United States Patent Application Publication US 2026/0191916 A1 - sequence listing, part 34

SEQ ID NO: 93 - DNA, 2278883 bp, Bacteroides uniformis
  source 1..2278883: mol_type = genomic DNA
attccggtaggtaatctgaacggatcatcttctacttactataccgacatgtactggataagcaccgctacggtccgtgtggtctatcgcgggtacatatgcgtacgcgagtggcggtgtatcgagtgcgagtgcgtataacgatgcttcgagtgcgagcgcgattgtcggctcgcgtctggccttccgcggcaaaatcgtccgggcgcaaagcgtggcagcgtacaaggcgatacgcgaggtggcgtaagcgcaaagcgccaaagcgtggagcgaagcgactaaaacgaaagaacgggattcggatggtttccgaattccatttaaaaggtattcaaataccggcgaagccggccgaatttttttagaatattgatagggtaggggaatacaaaactgaactgatttgagggtaaacgacctcaatttaactatgtaaagatagtgatttttgttgatatttgcaagttatttttctgttatttttagcttagaattgaccagttcaaatggaataaagagtgctttaaattatacgcttcgttttgtgaaatgaacttttcattttgaaacgcgcgaacatttcgatttgcggattatatatctatggttctttctgcaaagttatacaaaaagaagaatctgtatatgattggtaatcctcgaaatgaaaacggatgtggaagataactccgttaaagggtttcctgcttcagtgcttccacaaaccggtctatttcctgcagtttcgccgggatgtcgatgccttgcggacagtgcgggttgcattggccgcaaccggtgcaacggttggcttggcggagacggggaacactgcggtcatagcctatcaggaaggcgcggcgtgcctcgcggtaattctcgtcttggctgttctgcggcacgttgccctcgttgatgcagcggttgtagtgcagcaggatggctggaatatccagcccataggggcacggcatacagtatttgcagtcgttgcacggcacggtggggtattgcagcattcgctgggcggtatcttccagtagggtaaactcctcttccgtacatggaacaagcggggagaaggtacgcaggttgtcttgcagatgctccatgtacgtcattccgctcagtacggtcagcacatcggggaaagtacctgcaaatcggaaggcccaggaagccacgctctcttgcgggcggcgttgtttcagacgtgccatcaagtggtcgttcaggcgggataggcgtccgcccagcagcggctccatgataacggcgggaatgttgcgcttcaccagctcggcatataggtattcggcatccgtgttgcgggtattcacttctttggcatgtcgccagtccacgtagttcagttggatttgtacgaagtcccatttcagttcgtcgtggcgggagagcaggtagtcaaagacttcgatgtctccatgataggagaatccgaggttgcggatgcgtccgacttcgcgctctttcagcaggaagtccagcatgccgttgtccagatagcgggaacggagggcttccatgccgcccatgccgatgccgtgcagcaggaggtagtcgatgtagtccacttgcaggtcgcggaaggagcggtgatacatggcaagggactcttcgcggctgtgcgtgctgggactgaagttggacagctttgtggcaaggaagaatttctcccgtggatggcgttttaaggcaatgcctgtggcgcgctccgacagaccttgcacataggcgggagaggtgtcgaaatagttcactccgtgagcaatggcatagtctatcaggtcgttcacggcttcctggtctatttcgtctccattcccatcggcgcgtttccgggtgggccatcgcatgcatccgtatcccagcagagaaacccggtcgcccgtgttggggttggtacgataggtcatcttgccggttggtatctcgcccagtgcggccgattcgctttccccgttgttcttgttgcccgaacagccgtatagggctgctgccgaggcaagcgttcctgcaccggcgagtttgaagaaatcgcggcggtttatcttgttcttattgtcttctttcattgtgataggactgaaattataaatggatattagggtgataaagttgcttcagacagttctgtgcatcacatggccttccacataaatggcactgaacggacgcgacggacaaaggttctcgcatgctccgcatccgatacagcgttcggcgttgactaccggtatcttgatggaggcttcgtcttccgggtctgaaggaaccatctgtatggcaccggccggacaatggcgggcacagttcccacattccatcttgtctgtgatgcagatgcaattctccttaatccatacggcatgaccgatttggacggccgatttctcggcgaggctcgtcagatggatggcatcggtaggacacacctccgcacacttggcgcattcggggcggcagtaaccgcgttcgtaggacatttccggctgcatcagttttgtcaagtccgaagaaggacggagcacttggttggggcataccgatacgcagagctggcaggctgtgcagtgttgtgcaaagtggcgggcgctcagtgagcccggaggagtgatgggagtggcgcgctcggggatttttttgtcctcgatgacagccagtccaccgtccactttcttctcctgcgccttgagggctgccctagcagcaaacacggcagttgtagagagaaatgcgcggcgggcgtcgtttacctgctccggtgccacggaggtttcctgggagactgcagcggaggccggcttgcggcgtgtgtaagtgatggcacctttcctgcacttgttgatacagtccatacatgccacgcaacggctgtaatctatttcgtgtgccttgatgttgatgcacgatgccttgcagttgcgggcacaaagtccgcaactgttgcacttctttgtgtcaattaccggtttcagcaaggaatacttcgagaggaagccaagcactgtacctaccggacagatagtgttgcaataggtacgtccgccccgccatgccagcacgatgaggactaccagagtgaccgtggcaatcagcagggtagggagactcttcatccatacatccgtttcatagaaggcatagctgtcagcacgttcggccaggtaggccagtccgttgtttgcccactggtagagtggggagaaaaggctggaaacgatgcgcccgtatgagctgtaaggggccagcagcacgacaaaagagttcagtccgccgataatggcaagtacgaatactcccagtacaccgtagcgtagccatttcagtgcggacgagtagcggaaacggtttttcttccgtttggcggagagcaaggaaacaatgtcctggaatactcccaacgggcagatgacggagcagtagatgcgtccgaataccaaggtcagcactgcaagaaacaatactacaccgatgttcagtgccagcacggccggcaggaattgtatcttcgccatccatccgaaccaggcatgcagtgttcccgtgaagtcgaggaacaacagcgtgatgagtgcgaagaagatgacggcaagggtcagtctgatggtacgtagcataaatgtattgtatagcggttagtattcgttctttatacttttttccccatctcgtaggcttcgtgtatggaaggcttgtcgtttatctcgcccaccttccaggcacccacgccataaatggtgccgcattctttgggctcttccaggcagtcgaggaagccacggaaaccatcgatggtacgttccatcatggggacactttcttcggcggcggcgatgatgaagtagaactccttgtcctttatttcaaggtagcgtgcgcaacaacggtcaatcagtgtcttcatctgcgcgctcatggtgtagaagtagacgggggttgccatgacgatgacgtcggcggcaatcatcttttccaccacttcggcggcatcgtccttttgtgggcagggtttgccgtacatgctgcatacgctacatcccgtgcagtagttgatgtgcttgtctttcaggaaaatcttttctacttgatgtccggcctctgcggcaccgcgcatgaattcgttgcacaagaggtcggagtttccattcctgcggggactggaggagaggattaatactttttggctcatattcgttgttcgttagttagtaaatgattacgtgctgcaaaaataggcaggttttatgagaatggcagtatacaaattacggttgttgttacctaaattactgattcattccaaaagtatctcccgttcgatgccggtgtctttcagaaactcccggtcgtggctgatggcaattacggtgccggcgtagtcgcgtatcgttgccgttattatttctatactctcgatgtccagattgttggtgggttcgtccagaatgaacatatccggggtattgtcggcaatcatcaggcagcagaaggagaggcgcatcttttcgccgccactcagtttgccgcacggcttgttccacacgtcgcggggaaagaggtaacggttgaggatggttttcacttcatgttccggcaggtggcggtggttgaaagcttctgcttgttggagtacgctgcgctcattacggacgagggagtattcttggtccagatagacggaggtgaagccggcacgctccatcactccgtcggtggggtgcaattcgcccatgatgagtttcagcagggttgtttttccactgccgttttttcctttcaggctgaggcggtcgccgcttcttagctggaaggtgaggggagaagcccagagactctttgcagccgtctccgtgtggggtgtttctgcgggggaggctgtatggtcgggataatggaagttgacgttccttgccgtaatcagaatcttgcccgtatgcagatgggaggtgttgaagtctgttttcagcttgtccgtctgcgacagtaaacttttgatgcctgccatttccgtctgcagcttttccgctttctccgcatgtatgctgctgagtctgctactgctgttttccgcattgtttttcagtgctcccatcatgatgcggggaatcccctttttaatggagtttttttctccccgcacattctgtttggccttccgttcttctacttcgcgtgccactttgcgtgcaaggcgcagggctttctgcttctcttctagttgttgggtgagggcgttttgttgcagggtcttctgttttttgtagaagtcgtagtttccgctgtaatacgtcaatccctgggaggagagttcgcagatggcaggcaactgattcagtagcgtgcggtcgtgactgatgacgagcacggtagccgatgtccgtcgtatcaagttatacagacgttcccgtccatccgcgtccagatagttggtcggttcgtccagcaggatggctgttgggttgtgcaactccatgcctgtcaggaagatgcgggtcttttcgccgccgctaagtccttccatcggacgggagagtgtgataccgtccagtccccagctgtcgagagaagcctgggcgcgttcttccacgttccagtcatcattgagcgtattgaagtgcttttcggtagcgtcaccgcttaggatggcatgcagggcagatagcttgtggctgattcccaaagcttgtgctattgtctgccggtcgtattgtccgaagtgctggggcacgtagtacagatgttcggggcgtagcaccgttcccgaacttggtgacaagtctcctgccaaaatgcgcatgagggtagacttgccgcaaccgttatttccggtcagggctattttatctccggagttgatactcaagtggaggtgtgaaaacaagatttccttatctgcatggatatagctaaggtctttaatgataaagctcataagtttctactgtgtttttagaagtaagaatgataggggagatgcaagcattccccgaaattgaaattctcgaaggggaggggtacggacaaacacagcattggctaaacatctatataggtgatgctcagcgttcagtctgaaaaagcatgttgatagtgatgtttaccgaaatgtgttgtctttagtcggatattctcatcggtggaattaattggttagtgggcgcaaaggtaataatttccactgaataacaaaggctttttgcgatattaatatcgtgtcggcaagaagttaatatcgtgtttgcaagaaattaacttcctgcagacacgatgttaatactttattggttctgttacttcatggccgaagcatcgaacgagagtggcagtaattctcccacattcttcagctcgtagattccctttttgccatacagcaacacccgcattggctgcttgaagcgcttctccgtttcgagcatcacttgccggcaggcgccgcagggcgggatgggagactccaggaactcgtcgtgctcgttgcgtgcggcaatggcgagggtggttactgcctggtcgggatgttgggagttggcatagaatagggtggtgcgttctgcacacagcccggaaggataggcggcgttttcctggttggtgccggtcactacaataccgtttgccagtctggctgcagctcctaccgagaagtgggagtaaggggcatagctgcggttggtagcctcgcgggcggcatccatcagttcgcggtcggcggcatccagttcttcatagtcgtatatcttgacggcgatttcgatatttaattctttcataaggcaaagggttatattgtaattaatgttacaaagatagaaaagagattggttatttcaattcttttacggacttttgtgcagaactcaacattttaagcatgaaacggattttcagactgactgctatcatagcatttctttttatttccataacaacagtgcaggcacaacgccggaatgcccgctacaatgagtatatcaaacagtatgctccccttgccgtggagcagatgcaacgtcataagatacctgccagcatcacgctggcccaagggctgttggagagcggtgccggatacagtgagctggcgcgcaagagcaacaatcacttcggcatcaagtgtggaggcaactggcgcggacggacggtgaggcatgatgacgatgcccgcaatgaatgtttccgcgcttatcgcaatccgaaagactcttatgaagaccattccgatttcctgaaacggggagcacgttatgcttttcttttcaaactgaagattacggactataagggttgggcgcgcggcttgaagaaggccggctatgctaccgacccgtcgtatgccaaccgcctgataaccattatcgaggattatgaactgtataagtacgacagccgtggcatgagcaagcgcgatgcccgcagctgggagaaggaactgaaaaagaaaccttggctggccaatccgcatcaggtgtacattgccaacgatatagcttatgtcgtggcgcgcgacggagacaccttccaggtgttgggcaaggagtttgacatcagctggaagaagctggtgaaatacaacgacctccataaagaatacacactggaggcgggagacattatttacttgaaagaaaagcgcaagaaagccgccaaaccccataccgtctacatagtgaaagacggtgattccatgcataccatttcccaaaagtacggcattcgtctgaagaacctttataagatgaatcgcaaggatgcggaatacgtgccggagattggcgacagattgagattaagataaagaagctatccgaaaatgtacagggtgtccgaaaacggacacccttcttttttgtcttttcgcttactttcagggggttatgattttggcatggatttagtatatattaagcgttatgttcgcaaacaataaaattaaaagatatggatagagaaattccgaaagaagtgcgtaataaagaacgcaataagaaaatcatccgctacggtgctatcggcgtggcaggtatcgtagtggtcagtgtactcatttcattgatgcgtacgggagtgaaggagaaagacctcgttttctccaaagtaggcaagggtacgattgaagtcagtgtcagtgcctccggaaaagtggttcctgcattcgaggaaattataaattcgcctattaatacccgcattttggaagtgtacagaaaaggtggtgatagtgtggatgtcggtacccctatcctgaaactggacttacagagtgccgaaaccgactacaaaaagatgctggatgaagagcagatgcgcagctacaagctgaaacagctgaaacttgacaaccagaccaagctgaccgaccttcagatgaaaatcaaagtctccgccatgaagctggaccgcatgaaggtggaactgcgtaacgagcagtaccttgatagcctcggttcgggcaccaccgacaaagtgcgccaagccgaactgagctacaacgtagcacaactggaatacgaacaattacagcagcagtatgccaacgagaaggaagtgctggctgcggaataccaagtgcaggagctggatttcagcatgttccaaaagacactggccgaaaccaaacgtacgctcgacgatgcgcaggtgcgttcgccccggaaggccatccttacttatatcaacaatcagattggtgcccaggttcccgaaggctcacagattgccgtcatctccgacttgagtcacttcaaggtggaaggcgagattgccgatacttacggtgaccgtgtggctgccggcggcaaggccattgtgaagattggcagcgaaaagctggaaggttccgtaagcagtgttactccgctttcaaagaatggcgtcatctcctttaccgtgcagttgaatgaggacaacaaccgccgactgcgttccggtctgaaaaccgacgtctatgtgatgaatgcagtgaaggaagacgtgatgcgcatagccaatgccagctattatgtgggacgtggggagtatgaactttttgtacgcaattccgacaaggaaattgtaaagcgcaaggtgcagctgggcgattccaactttgagtttgtagaagtggtcagtggtttgcaaccgggtgatgaagtagtggtgagcgatatgagtaactataagaacaagaataagttgaagctaaaatgataaaggtttacttgaaacaagcctgggagctgttgaagcagaataaactgttcagcatgctctacattgtgggtacggggctggccattgccatgacaatgattatggcggtggtgtattatgtgaagattgcgcccgtctatccagaggcaaaccgcatgaatacgctttacctcagcaattcaaaattcacgcagggaagcggcaacaataccaggaccatgcaatgggctgtttcctacaaggcgctgcaagactggttctatcccgtagagaatgctcttgtcgtttcggccgagctgcataatgacttgtcggaaaacagttatatacagcctgccgaccgtagcggtgattttccggttatggtaaagttgacagaccctgcttttttcaagatatattctttccaattcctggaaggcagtccattcacggcatccgacctggcaagtggcatttccactgctgtcgttaccgatgatttggcacgccgcttgttcggtacgacggaagaggtagtaggacgctcgttcagcctgaactatatcgactatcgggtttgtggggtggtgcgcagtgccagttacctcacctctaaatcctatgcacagctttatataccttatacggtgtcgcccgattacagcactcccaagtacgaccttccctatctgggagctttcagtgctacctttctggtgcaggacagtaagcagggagatgctctgcgggctgagataaaggaaatctgccgcaaggagaatcttatgcatcccgatgaatggaaagtagatttctgggagcagcccacctcccatctgttgagtgtcttcaagacttatgcaagtatggagtttgacctttgggccacagtgcgccactttctgcttgtcctgctcgtattgctgttggtgcctgccctgaatctgagcggcatgatatcgagccgtatggagggacgtctggcagagatgggcgtgcggaaatcgtttggagccggacgtaagatactgctttcacaagtgatgtgggaaaacctgctgctgaccgcactgggcggagcattgggcttgctgctggcatggctggcactttacgtgggacgcgagtggatatttacggtactcgacagctggccgaatatggtacccgaaggagtggaggtccgcgtatcgggtgaaatgctgtttgctccgctggtttttctcgccgcattggcgctgtgcgtcgtgctgaatctgttgtcggcccttataccggcgtggtattccttgcggaaaccgattgtgaactcactgaatgaaaaacgataagacacgggaggttggtatgtttaagttaatatggaagaatctttgggcgcgccgccgcaagaacggatggttgttggccgaattgatattggtgagtatcatcagttgggttgtattggacccggtgattgtggtcacgcacgaccgtaatatcccgttgggctatgatgcggagcggctttgcctcatttcattgggcgcattgcagccccaggcaccgggatacgacgccgaagcgcaggactctgctacgttggtggacaactattataatctgatgcgttatgtcaaggactttgacggtgtggaatcggccactcccgtgctgggattctgttatcccaattcttcgggaagttcgaatagtcaattgtttgccgaaggggatacgattcccttatctattatgatgatacaatttttgcctcatacgaactttttcgatacgtatggtttccgttccggtaaggggcggacacccggacagctgtccgactacgcctatgccccgaatgacattgtactgacggagaatgctgccgaacagttgttccataccaaagacgcgcatggcaaacgctgtataagcagagaccatggagataccttgtacatgccggttgtcggtacgataggagccatgaagatgtatagcgagtggcgtcccgtccccgttgcatttatgccgatgcttaccatcgatacaagttatatccctgaaagtgcccatatcctggtacgtctcaaagagggtgtcagcatggagcgttttctgcacgatttccgtccttggatggtgaaggagatgaggcggggcaatctgtttgctcgcagtgtccgttcctatgagcagattataacggagagcgaagccagcaattccacaccgatttaccgccgtaatctggcgatggcggctttcttcctggtgaatctttgcctgggtgtcatcggtaccttctggttgcagacacgtacgaggcgcgaggaagtgggagtgatgctgtcgttcggagctacacgcagcgacattgtccgcctgctgatgggcgaaggcacggtattgaccgtggtcgcttcactgactggttttctgctctatttgcaatatgcactgaaagaagggctggccaaagggcagaattgggtggagagcacagagagctattgggtgtcggatttcacctcgcattatctgctcgtgtcgctcgtcatctttctgatactgctggtggtagtgttggtgggaatctatatcccggcgcgcaacatcagccgcattccacctacggaagccctgcgtgacgaatagatgaaaacggacaaggtgttcattttcggacaccttactgcatgtataaatagcagataatcaatcataaacgattttggcacaacttttgacctcttgaaacagaaattgtgcggaatagaaacggaacagaataataacaattaaatacttaccattatgattaagttaactggcatcaacaagatttatcgtacaaacgagattgaaaccgtggcattggaaaatgtaaacctcgaagtgaacaagggagaatttctcagtatcatgggaccctccggttgtggaaaatctacgttgctgaacattatgggtttactggatgcacctaccagcggcaccatcgaaatagccggtacgaaagtggacggcatgaaggacaaggagctggctgctttccgtaaccggaagttgggttttgtgttccagtctttccatctgattaattcgctgaatgtgctggataatgtggagttgcctttgctctatagaaaggtgtctgccaaggaacgtcgtcatctggcggaagaggtattgaagaaggtcggtttgagccaccgcatgcgccacatgcctacacagctttccggcggtcagtgccagcgtgtagccattgcccgtgccattatcggcaacccggagataatcctcgccgatgagcccaccggtaacctggactccaagatgggtgccgaagtcatggaactgttgcatcaactgaacaaggaagacggacgtaccatcgtgatggtgacccacaatgaagagcaggccaaacagacctcacgcaccgtccgcttcttcgacggacgtcaggtggaataattactgcttagtcaactgtcaactattaattatcaactatcaattaatgaaatgcaaaccgtaagacaagcttttactatcttgaagcagaatccgctgctgagtacaatttccatactgggtacggcatttgccattaccatgattatggctattgtgattatctggcaaacgaagtatgccgatttggaaccagaagtgaaccgtagccggtgcctttacttttctgccatgcatataagtagcaagacagaggaagggctacagaactataattctccttcaccggcatttatgaaggaatgcatacagccgctgtccgaagtggaagcttgtactgcttttgctccggccagtgccgctttggtgtctcttacagacggtaacaaccgggtgaaagtggatgccatgcagaccgatcaggggttctggaaggtattcagcctgcagttcatggcaggacacggttttggcgaagaggaccgtgcgggaggtacaaaagcagttgtggtttgtgcttctgtagcacggaaactgtttggtacgacggatgcggtggggcagcaattgttgttgaaccgcgaaccggcacgtgtggtaggagtggtaaaggatgtttctgtcaccgcaaaggatgcttacgcacaggtatggagcatgtatccggcagataagttggaagtgacttcggtatggagctacggcggtggtgttcatattgctgtgctggcacgtacatccgacgatttcccgaccattcgtcaaggtattgccaaacgggtagaggctgtcaatgcaggattgggagacatgcagatagacatcatggagcaaccggacgacattgtggcgcatgtgaaccatgtatggtccaatgtagggccggatgtgacgatgctatacctgcaatatgccattgcattgttcatcattctgttggtgccgtcgctcaatttgtgcggactgagtaacagccggatgcagcagcgcacttcggagcttggagtacgtaaggccttcggaggaacgtgcggtgtactgatacgccaaattctgaatgagaatctggtgctgacactgcttggaggtgtggtagggctgttgttcagctacatagctgtatggggaatgcgtacctggctctttaccaatagccagaatatcggtacggccggtgactttagcttgagtatggaggcattgttcagtccttgggtattcctgctggcttttactttctgcgtggtcatcaatacgcttagtgccggactgcctgcatggatggcggcaagacggacaattgtagattcactgaacgataaataaaacaagaagtattatgaaattcattgtacacaacttacgcatgatatgggcacgcctgagcaatagtgggtgggttttggccgaactctttttggtattcatcgtgatgtggtttctttgcgattctctgggatgtatgaaatatactttctatcgtccgttgggatatgatatcgaccatgtttatcgtcttactacggtccggggaggcgagagtcgtgatacgacattgctcgatgccgacaaatacctgaatatcctgaaaaggttggaacaagaacctaccgtagaggctgcctcgttgagttattggagcttgcctatgagtggcgcgaatagttataactcgctggctgtacaagataccatcggggtgggcgggcgtatgatttatgctaccggtggatatacccgggttttccatatgcaggaggaacaagggcggacttttgccgctttgcctatcggtatcaataatgtgatgttgagccaggctattgccgatgctttcaagaagcggctgccggaattttcgctcaacacaccgttgacatggcgtggagatacggtgaatacggttactcaaggtggcattgtcggcagcttccgcgattatcgctatggcgatgacgctcattggatttttatgcgcctgggcgagcagcttatgcgtgaggaattcggtgatcagcaggcgcagattgttttccgtgtaaagcctgctgccgacgggccggactaccgggaacaatttctccgcgagatagcgccgaggctggacacggacaatatatttgttgccgacgcggaaccttacacgcaaatgcaggcacagttcgaagtgctgtatggagatacggacaaggtgaacagtcagacaatagtggtactgttcctcttgggaaatgtcttcttgggactgataggaactttctgggttcgtacgcgccgtcgtcgctcggaaatagccttgcggttggcgatgggcagtaccaagcagcaggtcttttcccttcttatgggtgaggggttactgctgttggcgttggttactctgcctgccatgctgatatgttacaacgtaggcattggcgagttcaccattggacgtaccgcattgattgccacctggccggtggagtggggcatgatacgcttcctgataggctcgctggcagcttggctgttgatagcgctgatggtgatgatgggcatttggtatccggcacggcaagccatgaagatagagccggcagaggcgctgcatgaagaataagaaaataatatcaacgataaaaaaagaacgtatcgtctgtttgtatcaaacacatcacttgtttggggcaaatacatcatccgttcgtactaaacacattatctgttttttttgagtaagtaatcatcgtaataaataagtaagaatatgaagacaaatattataggtgttatcatcgcattggcattggcatttgcaggcgtaatttgtgcatggggacaagataacaaagtgagtgaagtgcgtaaggtggaggctttctcatccattaggataacttctgtgggtacggtttacttcacacagagcgacagctactccctacagattgaaggacgggagaagtacgtgaagaatacggagagcacagtgaaggacggccatctcaccatcggcttcaagaataagaagatgcgcaaccaaaatgacggtgtcaccatccgtctctcggctccggacttagagatggtggaatttatcggtgtgggtgaattcaactgtgaggaacccttgaagctggataagctggagtttgaagtgaaaggtgtgggtgatgtgcatgtgaaggatttgacttgccgcgacctgcgggtggctttgcggggtgtgggtagtgccgacatccatgtagtttgcgattatctctctgccaaggtggggggagtcggcgaaattactctgagcggaactgccgggcatgctgacatttctaaaggaggcataggcggggtaaatactggtaatttgaaaataggccgttaagatgataaaacaatacttcacacaagcctgggcacagttgcggcagcaaccgatgattagtgccgtcagcatagccggtacggcacttgccatcttcctcatcatgctggtggtgatgatgcagcaggtgaaggtagctccgtttgctccggagagcaaccgcgaccgctttctacatgtgcattatatgagcatcaccaacaaaagctggggagagggaaacagttccaacggaccgatggggataaagactgcgcttgagtgcttcaaatcgctgaagacccccgaagcagtaacgatttatacctgtatggtcatttctacccccgtgaatctgccgggacaacctgcaacgggtatcgacctgttgcagacagatgatactttctggcgtgtgtttgatttctcttttgttgccgggaaaccttatgaccaggctacattcgatgccggactacctgtagcggtaattacggaaagtgtagcgcgcaggttattccagacaacggaggctgttggtcgcgaattccttttgaaccatgctccttatacagtgtccggtgtagtgaaggatgtttctactttggccaacactgcctatgcgcaggtatgggtgccctatacttctactgagataacgaaaagcacatggagtgatgagcatatggggatgatgagcgttaccattctggcgaaaagccgtgatgattttcccgctattcgtgaggagacggaacgccgccgtcaggagtacgacactgtaattggcgagaatggttattcgttgatttaccgtaaccgtccttatgaccaggagaaaaatgccgcaggaatggctgccaacatcgaaccggacgtggaccaggcacgcaggcagcgtctcattatcttcatcattctactgattgttcctgccatcaacctcagctcgatgacgcagagccgtctgcgccagcgtgtggcagagattggtgtgcgccgggcattcggttcaacgagactggaactgatggggcaaatcattgcagaaaatctggtggtgacattgctggcaggggtgatgggattgttgctgagtgtagcattcgcttatttgggaaatacactgctgtttgcgcaggaattcagccagacgctgagtcctccggcagtggatgcgagcatattgctgcatggctccacctttggctgggcgttgttgttctgctttgtgctaaacttactgagttccggtattcccgcatggcgtgcatcaagaatagggattgtaaatgcattgggcggacgtttgcataaataactccatcacaaaacattaatcattgaagaaaatgactaagaaacttcttacacagataaagaatgaatggctctcaaacctatggttggtgttggagttattggtagtgagtgtagtgatgtggtacgtggtagactatctctacacgcgcgccgccacctatctggagccgagaggctttaatatagagcactgctaccttatagagttgggggaactgacacccaaaagtcccgactacatagccgggcatacctctcagcagacccacgatgacatagccgagttgttggagcgtctgcgtcgtcggccggagatagaagcggtcagcctttcgcagaattcgtatccttacaacggaagcaattcaggcgctgaagtaagctatgacactttgcgttctcccggttggaccatccgcaggttagtgacaccggactttccccgtgtattccgctatcggggcacgcgtggcgagacacccgaacaattggctgaaatgttggagcgcggggagtttatggcttcggataacctctaccggaaatacgactgccggatgacagatctcgtaggccagcggttctatctttttggtgatactacgaagacctaccggctgggtgctgcactgcaaaatgtacgctatcacgattatgaccaggcgcgaagctcatattccatgatggtgaagcagagtttctactatatcggtctcgaactttgtgtccgcgtccgtgaagggcaggacaatgacttcattgagaggctgaaggcagacagtgagagccagttccgcataggcaatatcttcatttcggagatacgttctttcaaggatattcgtcgcaactaccagcaggcatggaccaatgacatccgtaactatgtgatgggtatgggattcctgctgctgaacattttcctcggcttgctcggaacattctggttccgtacgcagcaacgccgttcggagatagcactgcacaaagcgcatggagcgacagaccgtgccatcttcagccggctgcttagtgaagggatattgttgttggcaattgtcacccccgttgcattgctcatcgattataatcttgcacacctggagttgaactcctggaggaacggtacgacgttggagtgggaccgcctgctgctatgtgccgccatcagctttgtgctgattgccctaatgattgtcatcggtataggtattcccgcccgcaaggcgatgaaggtgcagcctgccgaagcattgcacgatgaatagaaagctatgaaacaaattttagctcttatccgccagaatccctttttcagtgctgtttccgtcatcggtacggcagtgagcatcacctttgtcatggtcatttacatggtgtatgacatccagacggctgacttagctcccgagtcgcgccgcagtagtatggtatattcctcttatggatactcttaccgcaagtccgaccacagcaattccaatacgggcatgtcttatcgggctgtcaacgctattttcgcagaacttccgggtgcggaacttgtcacctatctgggacctacctatcttagatactgtggggattcgcccgtgcggggaatgcgccgtacggttcgtcaggtggatttgaactattggcgtgtctacgatatccctcttgtggcgggccgtcttttcagtaccgaagagttcgatgcttgccgggatgtcgtggttataggcgaacagcttgctcgcgaagctttcgggtctgccgaagcagccattggcaaaaattattttgtcaactttcgccctaagcgcattgtcggggtcaccaaggatgtgagctctctattcacatttgcctatggagagttgtggatgccttattccacccgggattccggtctgggcagtgaagggctacggggagatttcgaggctgtggcccttgtcaagcccggtgtcggcagagaggaactcaagcggcagatagaacagtcgcttgcccgcttcaacgagatactggtcgaatatgaactggagcttcccgacctcagcacctatacggaacggcagttcttccgtaatgacacgatgagtcctgccgtaacctgcatcatcctgggtttgatattgcttattgtgcccgctatcaatgtcagcggacttatatcttcgcaaatgtcccgtcgcatggctgagcttgcggtaaggaaagcatacggcgccagccgttctaccttgatggtgcagttgctccgcgagaacctggccttggcatttgccggcgcattgctcggttttctcttttcgtgcatattcctatggctgggtaaggactggatgcttggcgatggtgctcccggaacgaattttgatgtaagcgtctggctcttcctccgtcctgcggttttcgtggctgtattggtggtgtgtctgttgttcaacctgctttctgtgtttattcctgcctggcatgccacccgtcgccctatagccgaggttcttggcggagaatgagcggataaacgaatcccaattaaaacagtaacgagtatgatacattctattttacaccagatatggaaccagcgccgcagtaacggctggctgtttgccgagctgttgattgtatttacattgatgtggtattgtgtggatgtactctatggctttgcccatgcagaacggcagcctaaggggtatgatttggagcatgtctataagataaggatttcctgcaatcccacacagatagtgccgtgcacgtcggaagacagcctgcagaccttctggttcaagccgatggaggaagtgctccggcgtatcaggcaatatcctgcagtggaaagtgctgccacgtggctgggtaccgatacttatacccgcgggcgtgtttaccaggggtatacgacggacagcgtgcatgttgtcgagactacagtgcgctatgtgtctcccgaatatttcgacgtcatgcgcattccgctgttgcaggggaatgtctcggattggaattccactgccagtcctctgcctgccgtggtgacccgtgatttggcagacagtctttttcagacaagtgccggggcggtgggccgcgagtttctggattattacagcggaggtctccgttaccgtgtctctgcagtctgtgccttgcagaagacggatgactatgcccgttacggaccttttgtcctgactcctttccccggttggttctatgaggaccagtacctcccgttcatctccctacggatacgtccggaggcggatacggataattttgcagctcgtttttatcaggatatgatgtcgcagctgcaggtcgctccattctatcttttcgacatacagagctataaggaccagaagatagagcgggatgctgccgaaggaatcaccccgtatatccgcagcgcaaggctcattgtgatattctttgttttcaatgtattcatcgggctgatgggaactttttggttccgtacccgccatcgccgcagcgagattgctttgcgcatggccatgggcagcagccgcggaagaatacgctggcaattgctgggtgaagggttgctgctgttggcacttgcttccatccccgctttgatgatatgtatcaatatggttatggcagatgtcacttttacggaagccacggatgccacttgggggagatttgtcatatgcgtttctattgtctggatattgatggcattgatggtgattgcaggaatctggtatccggcttcacgggccatgaaggtacagcctgccgaagcattgcacgatgagtgagttttttttgaataatctgtgctcattctcaatataacttgtatatttgcgtgacgaataagagttttgcgttgagtatacaaaatctatattatgatgaaacgccttttctttccattgtttgcaggcttgttgtggttgatgtcgggaacactttcggctacggaacgtacgtacaatgtacttttcatacagtcctatacaaaaaatactccttggcacagccttctgacagaaaatttggagaacggactggacaaggggggagttaaagccaatatcactactgaatatctgaatgccgattactggtctttcgcttccgagtgcttcatcatgcgccgcatctgcgagcgtgccaggcaacggaaaacggacttgattgtgacttccagcgatgaggctttcttcacattgacccattgcggtgattccctgccttatcagataccggtggtggtttcgggcatcaaatacccggatgagagggtctttgaaagaatgcccaacgtctctggctatgtttcgaaaacggatttcgatgtcttgctggatgcggctgtccgtatgttcccttcccgcagggagttggtttgtctgtccgacagcagtttcctgagccttaaaggggtcagggctgtggaagactcttgggaacgcataaaaagcaactatccggagcatgagttgaaagtgctgaacgtgcaggccaagtccttgaactctatcatcacttccatttgctatgactacaatgcctacaagcatattgttatagctcccaaatggattccttttctttccttgaagttgaaggctcccgtgtttaccagccagaacctggctatgacgaacggtgttctgtgtgtgtatgatgccgttcccggagaggatgcttttgctgccggccggcaggctgcaagtattttgaagggcaagtcacccgcctcattggaagtaaaggactttgggggcaagttgctgttcgattacaaacagttgcagtttttccgtgtggacacgaaccgtgcggagagcaagggcatcattttgaatataccgttgatggagcgttaccgtgtctggttcattctgttctattcgctgattgtcggggcattggtgctgctggttgcctggcttttccgtgccaaccgcagggagtcgcgtaagcgcatacatgcccagacccgcttgttgatacagcaccgcctggtggagcagcgcgacgagttcgacaatatcttctgttccattcgcgacggcttgattacgtatgataccgacctgcgcatccattttgtcaaccgtccgttgttacagatgttgggactttcttccgaaacctatacgtcccgtttctatgaagggcagatggccggctccattttcaggatttacatgaatggagaaaacatcttgcaggacttgttgaagaaagtacgtaccggaaagagacctatttctattccggagaaagccttcatgcaggaaaaccatcagggaacgtatttccccgtttccggcgaggtagtacctatctttgccaatgaaaagatgacgggaatggcgattgtatgccgcaatatctccgaagaagagatgcagagacgcttcttcaatatggcggtggaggaaagctccatttatccgtggcagtacaacatgcatatgaaccgtttccatttcccgggtggattgctgcgccgtttcgggtataccggtgatacggacttgctggcacgtgatgagatggacacccttatacatccggaagacttgctgcatacgcgcaggaattttgatgccattctgttgggcaatgaaatcaattcacggatgagtttccggttgaagagtgcggatgggagctatgaatggtgggagttccgcagtaccgcttatgacggactgacggttgataccccatacatggtattgggagtatgccagagcatccagcgttacaaggatacggaagaggccttgattgccgcacgtgaccgtgccttgcaggccgacaagctcaaatctgcgttccttgccaatatgagccatgagatacgtacccctctgaatgccattgtcggcttctcggatttattgaaggacttggacgctttttctccggaagaggtaaagcagttcgtcgaaacaatcaacatcaactgtacattgctgttggcgttgataaacgatattctggacctctcgcgcatagaatcgggcacgatggactttaagttcggagcattcaatctggcgttcatcatgcaggaagtccatgaatcccagcgtctgagtatgcctcgggatgtagagctacgtataaagattccggaaggggaagacaaattggtcatcaccgattccgtccgcttgaagcaggtcgtgaacaacctgataaacaatgccaagaaattcacggtaacgggcagcatcaccttcggctatgtcacgaaccgggaaggatataccaccatctttgtcgaagacacgggaagcggtatctctgaagacgcccagaaacatatcttcgaacgcttttacaaagaagacagctttacgcagggcgccggtttggggctgagcatttgccagaccatcgtagaccgcctgcatggttctatctcggtctcctcagagttgggaaaaggaacgcgtttcgaggtggtgataccggatgcgaacgagtaatcattcaatccgtttgcaggcattggcttgcaggaactcttccaatatatcctcgtaattgccatacagcatgatgtggtggttgcccagcggtgtcttgaggaaatagtcggcaggggagttcatttttatccgcacttgggtgcggcacatattgatgtagtttgtattctcaacaagcgtgccggtgctcaggtaatattcgtccaggctttcgcttccgcattttacgatggttacatctcccgtcggcaggattccctgaataccgatgccgctttccgtctcaaaatggttgcgtatgatgaactgctccgtttgtgcgatgccgatggtgcagtgtgccaatatgatttcattggtacgggcatttatcatggaaggattggccatgaaggagtttttccccgtcagcacttttacggccagcatggtgaagacggattgcaaatcgccttcacatccggcaatgattccttcgtcgttcagcaaggcaagggcaaggcagccggtggttcccgtttggtctatcaggcggaagcagctgagggtaatggcgctcagtcgctcttcctctacaatcctcttgatggctcgatacagccgcatggcttttatcatgtcttcggggcttgcctctcggcaggcaagcgcttttcctgccagtccggcgcatgcttcgcccacctcgtcgtccgttatctgtccgtagtattcataaatgcggtccaatgagacgtctgtgtactcgataccccagcggcgtttggcaagcagataatccacattgctggcaacgagccagctggacggagtgcccattacgccgatgcgcatgccgaaaaggctgcgttgtgccacgaaattgctgtgcaggacaaaaatacgcttgatggtctcggggagctctccgtgaagaatctcgcttttcattccccggccgcgcagccaggaagatatttcgagagcggcggccagtgagttctgcatgccgtctgccaagaggatggcggggcggggaagggattcgaaatgctggattaccagccgttccacacctccggtggcaatgaatataatactgaagtcatcgggtgataacttgtctatgtctttgtaatcaatgaagttgacggtaaagtatttttccaattcagtcaatatcacttcgtgggagctacggactgatgcttgtttatgcagtatggaagcaaaagttataaggttgatgaccatggtgttatttactatttacaattgattctacttggctcgtttgctttttcaaagatacaagtttctgtttacatatcatagagtttttacgatagataagttttttaaagtttttatggtcttgccttccttttggtttcaaataattcgctacatttgcaactttaatgataaagtgatagcaatatcacctataaatactctattaaatagtaaatcataaatcgtcaaatagtaaataaacctcatgccaacaatatctattcgcggaatggagatgcccgcatctcctatcagaaaactggctcctttggcagatgctgccaagcagaggggcatacatgtattccacctgaacatcggacaacccgacctgcctactccggaagtcgcgattgaagcgatacggaacatcgaccggaaagttctggaatacagtcccagtgcggggtatcgcagttaccgcgagaagttggtgggttactatgcgaagtacaatatcaatctgactgcagacgacatcatcatcacttccggtggctcggaggcggtgttgttctctttcctggcttgcctcaatccgggggatgaaatcattgttcccgagccggcctatgccaattatatggcgtttgccatctctgccggagccaagatacgcaccattgccacgaccatcgaagagggtttctcgttgcccaaggtagagaagttcgaggagttgattaacgagcgcacgcgtgctattttgatttgcaatcccaacaatcctacgggttacctctatacacgccgtgaaatgaaccagattcgcgaccttgtgaagaagtacgatttgttcctcttctcggacgaggtgtaccgtgaatttatttatacgggttctccctatatctctgcctgccatctggagggcattgagaacaatgtggtgctgattgattccgtgtccaagcgctattcggagtgcggcatccgcatcggtgccctgataacgaagaacaaggaaatccgggatgctgtcatgaagttctgccaggcacgtctcagtcctccgttgattggccagattgccgcagaagcatcgctggatgccggtgaggattatctgcgcgacacatacgatgaatatgtagaacgccgtaaatgcctgattgacggattgaaccgtataccgggcgtatattcgcccatcccgatgggagcattctatacggtggcaaagcttccagtagatgattcggacaagttctgtgcctggtgtctgtcggagttcgaatacgagggacagacggtattcatggcgcctgcgtccggattctatactacgccgggttccggtcgcaacgaagtgcgtatcgcatacgtactgaagaaagacgacttgaaccgcgccttgtttgttctgcaaaaagcattggaagcctatccaggacgaaccgaataaaatgaaataattcattaggcgcggattacgcggattacacggaaaacttaagataaagacgtttgtttcaaatcttccgtgtaatctgcgcctaaaaaataatgacccatgaacttatctcgctttatagcgttgcgcatttatcgcaactcggagccgggcaagcaagtttcccgtccggctgtccttattgccatggtgggtattgctctcggactggcggtgatgattattgccgtgtccgtcattgttggcttcaagagcgaggtaagggataaaatcgtgggtttcggtgcccatatccagataggcaacctggatgctgcacgctcttatgagacgcgcccggtggtggtgggcgacagcatgatggctgcgctttccgattatcccgaagtgaagcatgtacaacgctactccaccaagccggggatgataaagaccgccgatgcctttcagggaatggtgctgaaaggtgtggggcaggagtatgacagcacctttttccaccgccatctgctggagggggagtttccgcaattcagcgattccgcttcgtccaaccgcgtagtcatctcaaagtctcttgccaacaagctgcaattgaaactcggtgacaagatagacacctacttcatccaggacgatgtgcgtgcccgccgcctgaagattgcaggtatctaccaaaccaacttctctgaatacgacaacctattcctgcttaccgacctctacctggtgaatcgcctgaacaactgggagccagaccaggtgagtggcgtggagctggaaatacgcgattatgacaagctggaagaaaccacctatgaggtagctgccgatacggacgggaatcccgaccgttatggcgccgagtattgcgtccgcaatgtagagcagctcaatcctcaaatctttgcctggctgggcatcttggatgtcaacatctgggtcattctcattctgatgattggagtggcggggttcaccatggtatccggcctgctgattatcatcatagagcgtacctccatgataggtgtgctgaagtctttgggagccaacaactttactattcgtaaagttttcctttggttttcggtcttcctcatcgggaaaggcatgctctgggggaacataatcggccttgcattctattttgtgcagcgctggtccggcttgttcaagctcgaccctgagacctattatatggctactgttccggtatctttcaatatctggctgttcctgctactgaatgccggtacattgctggcttcagtcctgatgttgttgggcccttcatttctgattacacgcatccatccggcaacttccatccgttacgaataagagaatcactttctcagaaaatcgcttttcttgcggaacagacagtaccatttccaacgtaaagactgtatcggctgcaataggtcgaaagccggtagtgtgaagtaatatctacgttgttcttccaggtcgcgggcggtcttgttgacaatgacggcctgcagggtgaaacggaacaggaacaaaagacaagcgacgcctgctgccagccagtggaagtgcagaatgccgatgaccatcgcggctatccaggatgcgtggaataccaggcgggtcagggtctcaaaaccggccagccagcgttgcatcccatgatacagccgtgctgtggaggcgtaacctattttctcttctttccagtccttggcacgcagaagcggttgcatgcgtacaatggcattggcatccgtttctacccgcgtgttctccggggtagccacgtggttgatgaacaaatcgtcgtctccccgttgcaggttgaggtgtgcggagaatcctttctgttggtagaagagttccttccggtaggccaggttacgcccgatgcccatgtaggggctgcctgccagggcaaatcccagatagcgcatggaagtgaacagattgtcgaatgccacccgtttgtgcagccagcctttgccgcgttcgtagccgctgtatcccagcaccacttgggtacgtgatgtgaagttgcgtgccatcagtcgcagccattggttgctttggggcatgcagttggcattggtaaacaccagccattcatatttgctggccttgattccaagcgtcacagccagcttcttacggctgatgtagcgggaggaatcgggcacgaagctgtggtagagatgggggtatttctcctcgaggatggtcaggtaatctttgctctcatcagtgttgccgtcgttaatgacgatgacttcaaataggggatagtcctgctccagcacggcgcccaggttgcggcgcagattctcggattcctcgcgggcgcagataatgacggatatggggggcagttcctgggtgaagtgcgtgtctccctgcttcacggcacggctgcgcgcatgaatacggttgtagagacagaggtagtagataatttgaataaggaacagaccacccgccgtagcgagtacgataatttcagttgaatctaatgtaaatgcttccatgtgcagtaggacgtttatgtgctgcaaatttacacaatttccggcactacctcaaactttgttccgggaaagtgcttggacaaatactgcttgatgtatttcatcgtgtcttcctggatagtcttgtcctctaccgtgggatagaggttgtagagtaccgtatcgagcgcgatgtcccggttcttgatggcttcgaagctcagcagggtgtggttgatgctgcccagctttccggaggtgacaaagataagcgggtactgcttctccgcaatgtagtctatcgtcaggaaatcttcggtaaggggaaccatcagaccgccggcgccttctacgagcacggtatcatagcgatgggaaagttccctggtggcacgctctatttttccgaagtctatcgggcgcttgtctatgcgggcggcgaggtggggagagcagggataggagaatatctcgggcatggtcagcccctctttgtcttccggcaggtagccggttccggtgaggcggcggtgcaggtcgatgtcctcggaatgaccggtgttgccggtctggatgaatttttgggtgatgacgcgcaggccgcgttgcataagctcacgggcgtaccaggcggtgcaatagctttttccggcatctgtatcaatgccgctgatgaagtagatgttttttgtttccattattttgttttttttcgtgcgatgatataaatagggtgataggtcaggcttacgttgcctgcggcatcactgaaccgggttgtgtattctttgcagaaggattgcaggcgactacgcgtccacatccttttttccgtacccgtgactccggtttgcttcagatgcttcagcactgcctggggagtggggaagggcaaggatatcacctcttcttcggcatgaagaatatcgaaaccgggagacagcagggcttgcagctcctcaacggagagatagtccagcccgtgcccagtcagttggcgtatttcgtgcatgtttgtggcgccgaaggtgctgaaggcaagcaggccgtctgccaccagtgcttggtggcagcgggtgaagaaagcacctgggtcgttgaaccattgcagggtggagcacgaggttatcaggtcggtttctccggggaagtcgatggcttcggcatcaccggggacgaactgcacggtagtgccgtcgcaaagttccttgacgcactcctccatttcccggcacaagtcgttcagcagcagagcttccggttgcaaggtgtggaggaggatacgtgagtagcttcccgttccgcagccaaactctacgacacggcggaaacgtgtgtatggttcctttatgagctgcatcatcttctcggcgacttgttgctgcacgcgggcctcccgggtataggtattccgggctttggcaaagcgggcggctatcagttgtttgtccatcgggttcagtggcttgtccataggtcttgcaggtaatgtctgaataactcttcctggtagtgggcatcctccgtttgcagtacgggggtgccgagtatttcccaggcttgcagctggttggctggtggaatgatgcggtcgttgcctcccgttactgcctgctgccaatggaaagtggcagcaggcagtgtgtggtacatcttctcaatctccgtcaactcatctctcaactcttccagcggacggcggggggtgatttccaggaaagctttgaaggctgctccgttggcgcacatgcggcggaggaatttgtgcagtgaagccccagtcagtccgtccaatgtcccgtggtagatggcgggtggaatgcccatatgctggtctatggggtagggcgttccgttgatggcgatgctgtttgccatatggataccttcgccggacgtacctggcgatgagagctgtggcacggtctgcgaagccgcccatacccccatagaccagccgatgaggttgatttcgcggtattcttccagtccggaggcgtcaaaatccagtgtgcggtagtcatagcacaccatgaagtcgctggctgccggacgatacattttgaaaggcgtctcatcggctccccagccggcaaagaacagcaatagccggggatgatgctcgtgtataatgtaactttgtttcatctgtttttagaatcgtatagcgttagtattcctctcttcctttaggggaataaggggtatcagttctccaatctcatcttcccgtatgtctgccgtcagcgaaaagcggatgcgtgatgtcctttcgggcactgtgggcgggcgtaccggcagtgcatagaacccatgcctctgcagcaactctgcgcacagcacagtgtcggcactggggccgataatcaaggggacgatatggcttgcgctagggcatccgtaccccttggcttgtaatgcttcgcgcagcgtccggctgattcttgccagatgctcgcggcggtcctgcattccggcaagtttccgcacgataaacagtgtccaggcaatacttgtcggaggcaatgccgtggtgaagatgagggttcgcatccggttgacgagatactcgcgtatcgtccggcaacaggcgatgtatgcgccggcagatgccgctgccttgccgaaggtgcccacgaggaaatctatatcccggatgcatccggtttcttcggcgcagcccaggccgcgcagtccccttacgccgaatgcatgggcttcgtccacatagagcagtacgttggagtatctttttttcaaacgcaccaatgccgtgaggtcggcttggtcaccgtccatgctgaagatgctttctgtgacgataatcaattgccggaatgttgcatggtgttgttccagcaggcgttccagttgcaccaggtcgttgtggcggaagcggatgcagcgtgcggtggataggcggatgccgtcgatgatgctggcatgcaccagcttgtctgccagtattagggtttgtgcatcgctcacggcgggcagaatccccatattggcatgatagccgctattgagcaccagtgctgtctctgtgccgaaaagtgtggcgagttccgtctccagttcttcgtaaatcccgaagttccccgtcagcaggcgggaggaggaggaagtcggcaggaaggtgtccggtgtcagtgtctgcaggaattcttcctttagctggcggtcggcagccaggcccaggtagtcgttggacgaaaggttcagcatatgccggccatcggctataaccgtgcgtccctcgtgtgtcagttgcggcaggcggcgcaggttgctgtgttctttcaatgtttgcagctcttgctgcatatattctattgcattcataattcttttaaaatgtgccaatgtggttttaatgtgctaatgtgccaatgtgctaatatgccaatgacctgcggcgtgatagcgcagcgtaaacattgcgcagccaattggcacattagcatattagcacattcttataattttcatcaatccccccgtcagcttcctcagctgttccggctctataatgaacggaggcatcaggtataccaatcttccgaacgggcgtacccagattccctcctcaacgaagcgtttttgcatccacgccatgtctacgggttcttttgtctcaatcaccccgatggctcccagcacacgtacatccgtcacttgcggtaatcggcgtgccggttcaagctcttcttgcagttgccggctgatgcgagtcaccttgccttgccagtcgtattcgggcgaggtcagcagcttcaccgaagcgcacgctacggcgcatgccagtgggtttcccataaaggtgggtccgtgcataaacacctccggcgtatggttggagatggtatccgccacttcattcgtcgtcagtacggcggacagcgtcatgtatccgcccgttatggcctttcctatgcacatgatgtccggttctacacccgcatgctcccaggcaaagagttttcccgtccgtccgaagcccgtggctatctcatcgaatatcagcagcaggccatgttccttgcatatctgtgccgcttcgcgcaggtactgggggtggtagaaccacatgccgccagcgccctgcaccacaggttcgaggataagcgctgccagttcctcgtgatgctcctctaccagtttccgcagttccaccgtatcccgttcatcccattcgccgtggaagcgcgagcgcggctgcggcacgaaatagcgcatcggtaatgatgccccgaacagcgaatgcatgcccgtcaccgggtcgcagacagacatggcattccatgtatccccgtgatagcccgaacggatagtcacaaaattgttcttcttcgcctttcccttgccataccagtactgcacggccattttcaaggccacctctactgccaccgagcccgagtcggcatagaatatcttctgcatggacggcgggacaagcggtagcagcaactggcccagttcaatggcagggtcgtgtgtcagccctccgaacatcacatgcgacatcttgcccagctgttcctctgccgcccggttcagtgtagggtggttgtacccgtggacggcgcaccaccacgacgacattccctctacgagtgtttctccgctttccagggtgatggtggcgccttcggcatgcttcaccttgtacaccggtagcgggttggttgtggaggtataggggtgccataggtgctctctgtcgaactgcgagccgcagaaccggtatccggcatcttctatcagtaccttgtcttccgacactttcgagccgagcgttgtcagcaggtcgcccacgatggcggagttgatgccgatgtgcagcgcttgcttcacggcctccttgctcagttgcgagcgtcctccggcaaagcggaggaaagctgtcgggttgatgaagcggaagagggcgatggtggtcagtatttcctcctcgctgagtggtgcctgccgttccagcggtgtgccggggatggggctcaggaggttgatggggatggactgtacttccagctcgcgcagtgtgaaggcgaattcgatgcgttgctccatgctctcgcccatgccgatgatgccgccgctgcagatgtccatgcctacgttgcgggcggcttgcagggtgcgcagcttctcttcctgcgtgtgcgtgctgcacagttggggaaagtaggagggggctgtctccaggttgcagtgatagcgggtgatgcctgcgtcgtgcagtgcccgcatttcgtcttcgttgagcagtcccagtgatgcgcacaactggatggacgagtgccggcgcatgtgccgggcggcttcgcacagtttctccatgtttctggaggagggcttccgtccactggtcaccagcgagaaacgtgccacgccctgggcttcattatgcagggcatgccgcaggcattcttctttgtccaccaggtcgtacacgtctgcctgggttttgtagtgcgacgactgtgcacaccacttgcagttttccgggcatcgtccggacttggcattaatgatggagcacatgtcgaactcctccgaggctcgggcccgggttatctcgtgggcagcttcgtatagcgcttccttgtcgggttgcacagccagccattcggcttcttccttactgatgtggctgccgcgcagcacttgttcctttaatttctgtagggtcatatctttcttgggttatgttcatggataaagacagaggtacggattgccggggcggtgcagctcgtcattctgctgcatggcttccggtaatccgtacctcttgttctcttttgtttcaggctatatgtgtcttgtccgcccgtattcccgcaggggcggatgaattgtgtttcaaaaagaatgtgccggttcgttcccggctccgtgaggatacttgtcaggacgctgctgctacccagcggaatgccggtgtcggtttcccttccttccgtttctcctttccaggtactctcttccccgcatccggcatgtccggcggttcccgcagtcttctgtttggacagagagctgtctgccacgcttttgcgcaggcaaccgatggtgacacaccgtcctatgctggcaaatgcagcgtaggcttttctgctccagcggcggaagcggatggtaggtgcggcgggtgatgtattcctcatgtttttttcagcctgatgcggttttgtttccttttagcggatgcaaatgtagaaaaaataatttcataacggtaatggtcatgcatgaaaaagccgcgcaaatgcaactattgcgcggctcttctttaagcaatgtcgtaggatttcactctttggacgactggtagtagagataccagtcattattggtggcaccattggactctacccatttggcgaaatcgggatactccaggtcgatgcgtacggtttcctttgccggagtgaaccggatggggccttccgtgccggttgtggccggcagcatgatggcgaatggatatttgccgtccttgttgatgtagtaggcatcgtcttcggctccgatttgctctgcgttggctttaccggtcgctttcttcttgggcagatgcacttctgtccggttgtcggctccggctgtatactgggcaatgatgaacgggttcaagtcgctctccagattcttcttaggcaatgtgttgtctgcaaatgtacgggttacggtaaattcgttgccctgcacagactttgcatcggggaataggatgacagaagaggtctctgtttcatcgactgctccggcaggcagttctatgctgcctcgctggctggccacatattgcacggcaaatgcgttggagtatgtggcggcaccactttgctgtacgggtacaaaggtgtcttccaccttcagcacataattgttgctgttgaatgaaatggcccgtttgtgttcgataatcacgtcgttcaagtcatagtcaccgccattgggccagatgtcttcgtaggcatacgtgcggtaggttgtttcggagctcgtcaccgtaggctcttccgggtctatgaccggacggtccgggtcttgaatggcttcattggggttggcatcgatacagaacagtatgtcttcgtagctggtatcatcgccatcttctactccgtagactaccgtgccgttgctggtggagagggagataaagcgagcttgttggcctgcatatatcttgttccattctttattggaatatatataatttatagagtagtcgatacctttattgggggtatatccattggggatgatgaaatatcctatggtatatcctgccgggaatttggtggagacattaccgttttcgtcctgatacagaagttgtatttttgtattcttctgtatgggagcgtcatatcgggaatatttgttaccacttccagaccatccggtatacgggtcgtctcctgcaatggatgcattgggaatgataatgaatttgtctaccttgtcagggctgttgggaatttcattggtcttgtagtaataatagccgatggaagtcaggtaaccggcacgttcggtcaggaaggtcagatacagttctgcatcggtaatcgttacgtgttgtccctggttgttgatatatgcttgggcaatggtggtgttcacatgctttgtatcgctcaccaaagctctgttgtccagattgctgggtttgctgtcataacctttccacagtgtgtgttgtaactgctttaaagttccgtcattgaaatttcccgtagttacaatgtcattattatcaataatctcaccgtgagattgtccccatccaacgatggagtatacccgttccttcctatcctttaggtcgatagtcaggttggattttgcacgtgtcatggcagctgagcgagtgttggcattgtcctcggtcatatctaccaccactttgccgttttccacatccgcttccacacacatgggggctccccaactttgtgagatgatatataccttttctgtcgctttgggcagttctacgttgccggtgaagcgtccgtctgcatctgcaaagattttaaaaaccgcttcgccgttgatggagtagaggttgtttgtctgataggtgatggggtcttctgtaaacacctctattaatgcgcctcctgcgatttttccataattcacgtcaaaagctacctgggctgttgttgcaaagtcaaagtattcgctctccggctttagttctgtttttccacgttcgggattgtataggtctttttcggtacatcccgtgaatatgctgcaggcaattgctgaaatgagggttgcagcactaactttcgtcataagtctaactttcatatttttattgttgtagattgcttgcttgtttgtcttatgaacgctgtctatatcacaaccgccacccacttcacagacgagttgtagatactacattttctcgagcgcttttttcatgttgcaaatataaacatagtatttataatctacaacttttggggtttaaaaacacttttggtgggttaaaaagttgtataaagtgaattgatactaattggatgaatcgaatggtgcgggcataaaaaaaggctatctatcccagacagccaatcttttgttaaccttaaatctaatactatgaaaaacacattgcaaatgtacgtgttttctgataatctccaaatttgcagtagataatatcatgttttataacaagacttaatggtcattaagaactttatctgcaatattcatcgtacatttgctcctgatatatcatccgtttgccctttatgcattatgcattcggtgcagacggatgatgtgttttcgtgaacttatatacagacaaacaactataaaacatacatttataatgaaatcaatccagaacaaaggaataaacctcaccgcagaagacctcaaaaatcgaatcgctgacagaaaagaacgatatgccaagcagcaggtacgacgcgagaaattggaacaaaccatggagaacacccgcaatgacatcgagcaactggagtatacccttgcacagatggaacgtaccgccaagcgctcccgtaatgctgccgtacagccttcccgttttgttccccgcgagcatatcgctagcttctttgcccgtgtttcccgttttttcgaccaccttcagcaccgcttgcaccgtagcttgaactatacttggttctgccttgtgctatgctcccgatatacttttcagagccgcctgaaaagcgtggaacgctgctgtcttacaccggccacggtgctggggtacttcaagagggagagggagatgtaaccagtgacttcgctcttatggtagaagcagccttagggattagtgcggaacttctcgttaataggcaggcgagatataatatggctgtctctcttaaagaaaaatcgctgaccgataagttgcatgaaatacacaaaatgtgtgctttactattatagtatgaaagtgttgcttttatcaataagacagtgagggtgtgtcatcaaccgttttgacacattcatttttcttgagcaagttttcttattgccactcgaactttcccagttttccctcccattctaactttgcaacatgttttattaataaatatatgcaaaatgataaaagaacaaagttttgaatggctgctcgagggatgccatcgcattgcagatgtggcagtggcctattacccaaactacgcgtatgcctgctcggccgtaaaggccctgcgccgttccattgcggaacacgcttgcctgctgaaggatctgacggaccagggctataccgccaggactgcccacctcacccccgtacagataggcatcctcctgagctactgggggatgcccgaccacgtgaaggatatggccgtgaaaaatccgtatcttctggtctctaaaaaatatgcgaaatagagaatgtatttctaatacattctgattattttagtatattattatatagggtggtggaggatgaggtgaaaccctctctcgccaccttatgtatttcattaatttttagccgattctaactgcttatttgtatccccctggctggtcccttacctttgtcgcattatcgaattaagaatagacaaaaatggaaaaagaaatgagacccatgacaacggagatgctgaagaaaggctatctcctcttccccaaagccttgtttgaggaacaaatgaatatgaaaaccggagagaaagccgccgatgccttcgaagcctttgtctttgtgctgacacacgtcaactacagcacggtgacctgcaacgtcaggggacaccttttcgactgtgtacgtggcgagtccgtactttccctggctcgctggatggagatattggggtggcctcgcaaccgtacgcgctacttcttcaacaagatgttcgacgccggcatcgtggagcgggtggccaacccctacgtgatgcacatccgtatccccgattatgatttccttactggcaatgcccgtcctaaagcagccccgcggaagaagaaggcagcgccggtggctggggtgggagaggacttctgcatcttctgggaaaagtttcatgacatcaccgagcatcccaaggtaaacatcggccgggcccgtcgcgaatggaaaaaattgacggcaggcgagaaacagcgggcactggacaacatcgacgaatattacgaccatctgaacaaccaaaaatattgtaaacaagccgccacctatctggcggacaaatcttttgaaaatgaatatgatgactgaaactactttttcccacgacagtgacctcgaagaagctgtcatcggtgcctgcatgatagagcgcgctgccatgcctctggtggtggacaaacttcgtcccgagatgttctacgaggagaagaatctggaaatttttgccgccctgcaatcgatgtatcgcagcgcaaagtccatagataccatcacgctgaagaacgaactggcagcccgtggcaaactcgatgccgtgggcgggccttacgaactgttacgcatcagctcgaaggtcagctccagtgctcatctggagtatcatgcgctcatccttaggcaattgcacacgcggcgtatcatgcgtacgggattccagcaactgctggcgttcagtgccgacgagtcgatggatattgacgacatcctggtggaagcccatcgactgctggaggggctggaggacgagagcggcgtagccgaccaccttcgctccatagaccggctgatggacgacacgctggccgaggtggagcagcgtatggagcacggatgcaacggcattacgggtatccctacgggttttgacgctctggaccacgttacggcgggctggcagcgcggcgacttgaacatccttgctgcccgtccgtcggtggggaagacggcctttgccctccacctggcccgtgccgctgccatggcggggcgtcatgtggtggtcttcagcctcgaaatgcaaggcgagcgcctgggagaccgctggctgcttgcagctacggagggggtagacccgcaacacctgcgtagcggccagctcacacccggcgaggtgaggcaggtgcatgaggcgtctgccgagttgtcgcggttgcccatactgatagacgaccatccgatgacgagcatggaccgcgtgcgttcttccgcccgcctgctgaagagcaagaatcgctgtgacatggtgattgtggactatctgcaactatgtgacatgaggagtgaccagaaaaaccgcaaccgcgagcaggaagtggcgcaggcaagccgcaaggcaaagctgctggccaaggagctggatatccccgtactgctgctgagtcagctgaaccgggcgagcgacggtagcatagaccatcgccccaccctgagcaacctgcgcgagagcggcgccatagagcaggatgcggatatggtaatgctgctttgccgccctgccctctacggcaagaccgtcgataagaagagtacttatcccaccgatggcctgggtatcgtcatcatagccaagcaccgtaatggcaaaaccggtgaagtctatttccatcataaccaaagcatgacaaaactggtggactacataccaccattggagtggctgacgaggaatgcaaagtgatggatggaaatttatagaatacagagacacaaagacacggagatttttcttattgcttgaaaaactctgtgtctccgtgttttttgtagtaaaaaaaatggcaaaacacttgacttccgcttcttaatgttgtatctttgtaatgtgcttaagaaaaggaataatcattgattcgggcgccctatcccttcccttacccacttctctcttataactcatttttcttaacttaaaccttaactttttaaatttatggatgtaattgtagagcgcttccagcgccgtaaaatcgtgagcaacccggcttcgcccatgttgtactatctccgtcagaaacccaagacctgcggcaccgtggacatcgatgtccttgccgcctccattcagaaaaactgtgccatgacgaagggcgacgtgaagcacgtcatcgaagccctggtggaggagattcaaggcaaccttgccaatggcgacaaggtgaagctgaaccagctgggcactttccacatgacgttccgctgtcccagcatggaggcctcggacaaatgtacggtgcgcaatatctcgaaggtgaatatccgctttatccccgacaaggagctgaagctggtgaacggcagtaccgccgtgacccgcagcccggcgaatgtgggctttgtgctcgacaagcccgaggagggcggctccggcggcggcaatcaaggcggtggttccggaggcggctccggcgacgacggcgaccagggcgaaaatccgctgggataaagaaggaatgattaagggttagtgattaatggttaatgaacacaagcaaatcgcttatcgctaatcaatccctaatgattaaccattaatcattagcccttaatccttaatcactaatccttaatcactaatccttaatcactaatccttaatcactaatccttaaccattaattcttaactattaatccttaattttatgagtacaaaatcatctgtttgggataagattctgaaagtgataatcgctgtagcctccgcgcttattggtgccctgagcgcccatgccatgacagtgtagcgggtttccttcacttttaatttttaatttctaatttttaattctcatgagattcatcaatcttatcgtcgtccattgttccgccacccgctgcgaccgctgctatacggagcacgacttgacgacagaccacctgcgccggggcttctccggcgcaggttatcatttttatatccgcaagaacggtgacatcaagtccctgcgtcccttgtccctgcctggtgcccatgtccggggttggaatgcaggtagcatcggtgtctgttacgaaggcggtcttgacgagtgcggtcgccctgccgatacacgcacccttttccaaaagcactccctgcatgtgcttgtgttgctgctgctgaaggattatcccggttcccggctttgcggtcaccgcgacctgagccccgtaaggggggcaaatcactttgtatgtaaactacgagagggataaattggctgaaatgccgatggataaagggattgacgtaaagatatagattttatgagtccaaaacgttctgttatatttgcttatattgtgggctaatttaattgagtttttatgaagttctaaacagtaaaaatgataatacgtaaagtagagggctgaattgacgctttttgaggcgcgattcagccctttttccgtgtggagtgtttaggtcattcttgaacacaacgaatgagatgagactgcttgataatggctctacgggttatcttaacgccaccatcagtgagaccggcatgaagtagcgagctctttttgatacctatttgagcgtcatttaggacggtataaatggcactgatactaccgaaataatagtcctttttctcgaaaatgagatgtacgtgaattatcttagtcataaattcattatttagaagtttctttctacaaatatattctaaataataaatatatagaagtatttccgaataaaatatatactatttagggtgtttagaggatatgacttcataagttcttttatatgctcaaatgaatagatggtattgatgaatagttatagagtgaaatgttaaaaataagtttaggcataccataaggcataccgataagacatacttttttcataggcaataagcttgtgtaatgtagtttaggcatacttttttaacaattagaaaagggtgtattttatatgatgtttccttttaggttatgtttttaggcgtttaaataaatatttatagggggatagtatagcgtttttagcaagtagtataattgcactaatcatataaactgctgattcataataggtatttatggaataagtgctattttagcgcaataaacgtgcgcgcgtcgcaaataattggcagtatagctcagttggtagagcacaggtgcgcatacgtgatgatacatgtatgcaggtcttttgttataagttcgactcttgttgctgccgcaatggtttttgaaggtgtgaagaacgctcccggcattcagggctccgactgagggataaagcgtgcggagattaaggtaattaattagttgtttgatggaaacgctcccggtgattgtgccgggagcattatttagtatgaaaatagatattcccattataaaaagaaatatcatccgcgaggttctctattcgcacaaggaacttccacggtatcagcgtgcactcgaaatcttgttttgtgcagtaaacggatatgaacctattgatggatatataagtgacatcgaagatgcaggatatcgagagctatacgctaaaatattggaaaaagtcaaggaactaagagcaggccttccaagtgccaataataccagcaagtaaacttatcaaattggctattttcttatttctattcttactttacattgatagcacgcaacaattgctgtatctgcaccatctgccctttcattacatccatatcatcttccagttgattaactttatcataatatgtttcattcagattcggcattttagcactgaaataccattcagcatgaagtatggtgtttatctcctgagcttccaaattaaaattggggtaattgatcttatctacattatctgacatgcagacgaggaatccatgttgacggaatcggttcttgatgcgtttgatatatgaacgcccatcagtgtcactaatgacgtagatgtgttggtcgggcatgtcctgccattcagaacggtcgagtaatctcacgataacgtaggagctatccaataatgtaggtgacatactttctcctttgatgcggacgcagaagtatttctcactattacgcaccatggatgaaggcatttttatggtatctactactttcaaataatcgggattatcgtagccacagcagcctgctgcaacagagatgtctaccagtgggattgaaacaaaatcattgtttatttgagataacgcaaaagaagattttggtggctgtttttccatagaaccgcgaccggtcaagagccaatctaaatttatatcgatatttcttgcgattttctctaaaaaatcaaatttaggcatcgttgacgttctgtagccacggacatttgcttcattacttcctattaaagaggcaaatacggtgtttttcccattcccgtacttattaactaattgagttatcctctcgtgaattgtttcgtctttctgcatgattttaatatataaatcgtgaaatagttcgataattatttgcttctatcgaaagaagtttcgatatttgcatcgtcatccaaatggaaaacgctccaaatatacagaattaactttataaatagaaatacaatggcagaaaaggaaagattcatcaaagcagacgcttcacaacaagaagccatcgctaaacagttttttaccactacacgtactgtgcgttcggcattgaattttgagacgaactcaccatttgcgaaaactcttcgtgcttatgcattgaatcacggatgtaaaatgtatgaagttacattgatagataacccgtacgagaaagtaaaaaccttataaacaaatctttatgatttactggaaagaagaatgcagggttcttgccacggagcgtgctgagattgtcgttgtggatagctacgacgagcgtggagtacccgtgtttgccgtccgtcaagtgacgaaggcggtaggtacccgtagtggcaggaattcctattggggtgtacattttgatgaaccgttgtccgacgggtgtacggctgtgggattttcttttgtattagcctatagtactgacaaaagaacagaggacaaaaggttacgtgggtatcatcccgcatggacactcactattgacgatgaaggtagactggtagaccgcaagtataaagccttaaaggagattgataaaactattgattgacagatattaaacttgaattatatgaaaacctggagaacaattcagaagattgccgtagctgtgggcatgacctatggcatgtggctgggaaccaatgttgacgcaacggatgcggacagccgcaatgcgtttgtaatcatcgtattatcggctattgtggcgatatcgctttgtatgccggacagcggaaaggaggaaatggcatgaaagtaaaggtgacatgggtaagcaataacccgtttgttctggatctcagaaacatgtcaagatgctcagaggctgacgtacctgccgagatgaattacgataccattgaagactttgcccgtgaggcaaccccgcagggctttcatctgcggtcgatagatgttgagggcaaggttgtgcaatatgactataacggccataaactgtaaagtccggaacaggctgcaagtccggaactttccttgccatgcggaagtggccggctccccggttcgatgccggggcttgcacaatgttgaaaagtataaagtttctgattatggaaatgtacggtaaaataaggtgtgtcacttttcctgagctggtctcgcaaggaaggatattgagtaaacctaattatgataagaaagtacgtgagggcaagatccgggttgtccgtcccggtaagggggccggttcctacgctctcatagactacaccagtcttcccgcccttattcgcgaggcatacgacagactttatcccaatgctttggaagaaatgaaagaacaattaatgagtaatattatccgcagtgacagcagggctgtggaattctatagaacctaccaacccgccatttctctggaacgccaggccgaatatgtgctgaatgccgaggtgatgaacgagctggtccgtgtggagaaagagaccggagccttgcatagcaagtgcggttacagccgcaagtccatcgtgtgggaaacggtgcaaggtacatgtgagaagcttcgtgaacactatggacacacactgcccaagacccgtctccgcgaaaaattcaacgcttataaaaagatcggctacgccgcccttgtcaacaagaacacgggcaaccaggcggcacgcgtggtggttcccgaagtggcgcggctgttgctgaagctccgccgcagcatcgttccccgctatacggaggcgcagattttcgacgaatacaaccgccaggcggtggagcgcggcctgaacatcatcaagtcgcccaccaccgtaaagaactatctcaacgaccctgccgtgatgcctatgtggtatgcggcggtacatggcatgcagaaatggaaagccaagtacaccagtctgatgaagaccagcctcccgcagatgcgcgatgccttgtggtatggcgacggtaccaagttgaacctctactacaggaatgaacagggcaagatgtgcaccaccggcgtatatgaagtgatggatgcctatagcgagaccctgcttggatatgacatcgccccgaacgagaatttcgactgccagtatcgtgcctaccgcatggccgtggaagtttccggcagccgtccctacgagatagtgaccgacaaccagggaggacacaagaaaggcgacgccgcgggattcttccaacgccttacggtactccaccgtcccacgatgccctataacggacagtccaagaccatagagaatgccttctaccgtttccaggcacaagtccttcacgccatctggcattttacgggacagaacgtgaacgccaagaaactgaacagcaagcccaacctggaattcatagaagagaacgcctacgcactccccacgtttgaagagctgaaaacaatctacaaggaatgccgtgacagatggaacaataaggaaaagcacttcgccaccggtattccacacatggagatgtaccgcatgagcgggaaccccgaggcccaacccgttacggaggttgacatgatgcgtatgttctggctgtgccatcccaaagccgtgacctataccaactacggacttcagtttgaaatagacaaacggaaataccactatgacgtatatgccgccgacggcctgcgtgacgaggcatgggcgcttcgcaataccggacgcgagttcaccgtgatgtatgatcctatggacatgacccgcgtggagctgtggcggaataccgccaccggtgccaagtacagcgccaccgccactcctaaggtcactgtcagccgcgccacgcaggagcgcacaccggaagagagcagcttcatgcggaaaaccatcgaccggaacaaggagaccatggccgccatccagctggaaggcgagcgtttcgaccttgacgaacgtatcgcagccgagctcttcggtctttccactcccaaacctaagaacctcagcaagaataagatggacggataccgtgaaaggcatgaccgtggcgagctccatattcctctttccctgccggaaaaacagaagcgggaggaggccgaagcggacacggaaaccgattactccactatgggggaatataccaaggcactctccaacatgacgttggacgagctggcactggacagattttaaacggcaatcaataaccaattaaataccattcaagaatgaaaggactaaccaaacaagacaaggatgccatccgcgacgcactgatggcctactgtgagaactttcccagccgcaaccgcgccagcgagagcctgcagggtgtcagtgcggctgtggtgagccagattctgaacaccaagtacgaaagcatctccgacgacatgttcagccgcatagcagcgcagataggtttcagcttcgagcattggaccatctgcgagagtgagaacttccgtctcgccacctacgtgctggccgacgcccagatgtacaagaatgtcacctggatggtgggcgatgccggatgcggcaagaccactgccgccatagagttccgtcgcacacaccgcaacgtgttctatatcctttgctcggaagatatgaaacgcagcgattttgtgcgcgagatagccaagcaggtgggcgcgcctaccgacagcaccagcaacctgcgtgacatgctggactatgcactcggtatgatcggttttctccagaacccgctgctcatcttcgatgagggggacaagctgacggactgtgtattgaattacttcatcagcatctacaaccgcctggaaggacgcgcgggtatcgtgttcatgagtaccgactatatcaagcggcgtgtggacaatgggctgagatacaacaagaaaggctacaaggaaattaacagccgcatcggacgcaagttcttcgacctgaacgccaccagccgcaatgacgtgtatgccatctgtcaggccaacgggctgaccggtgaagccgagataagacgtgtgctgaaagatgctgaaaccagtgacaatgacctgcgccgcgtgaagcgggtgatacatgcgcagaagcgccgtgccgagcagcagaaaggaggggcagagtaatgagtgagacttttgaacgtaatgccaagggggtacgtgagatgctttccatgaagtttgacacactggactttgagggggtgtggcatgacgctttcggcacacccgagcgtcggggtgtctggtttgtgtgggggaactccggtaacggaaagacttcatttgtgatgcagctctgcaagtatctctgccgtttcggccgtgtggcctataacagtatggaagaaggtgcctgcctcaccatgcaggacacactccgtcgctttggcatgatggaggtcaaccgtcgctttctgcttatcgacaatgaaagcatcgagcagctcagcctgcgtctgaaacgtcagaaatcaccagattttgtggtgatagacagtttccaatacacacagatgacctatcggcagtatattgaattcaaagaacgccaccgtaacaagctgatgatttttatcagccatgccagtggcaggctgcctaccggacgcagcggcaagagcgtgatgtttgacgcgtcattgaaaatctacgtcgagggctaccgggctttcagcaagggacgcttcatcggtccgaaaggctactatgacatctggccggaagaggcggcaagatattggggagaatgtaatatgcaatgagccatgagaacgactgccgacaaacctatcagcgcccagcagcttaaagccctgcacgccaccttccaccgtatcggcatggatgacgaggcccgccacggctgcatctacgagttcacttccggccgtacggaaagcagccgggaactgacgatgcgtgaggcgcggcagctgctggagcggttgaacccgacggacgacaaggcacgggccatgcagatggcagaagccaggaatgtattccgggacatctaccgtctttcgttccagattccccagctgaaccaggggtttaccagcgacagtgaggaggaataccgcatgaacgtggcgaagctgaacatctgggcacgtaagtacagcaaagcgcgcaaggatataacaggcatgaagctttgggaacttcaggccactaaaaaacaactggaggcgtggatgcgccgtgaggaaaggaaacttaaaaaggattgatacaatgagaaagaaacaggaaataaggaaagggattgccatcctccgcatgaaaggggatagaatcagcctgctccaggccaaggtgctggaaaacgggcataatgagagccaggtgtttgccacctacgtggcttctgttccggaggaagacaaggatgagaccgtgttttatgcctgccgtgacgccgcccgttttgccgcagggcgattatcgctggaagagctgataccggatgcggacagatatccggtgacggttgacagacctgaacccaaggagcgccagtcagtcagtgtacgggagtttgaggctctgaagcgtaaggtcgcacagctggaaggctttgtggaagatttgctgaaggaacgccgccaacgtgccgaataccagaaattgccggatacgaaccgtgcggactatatcggccagaaagatgctacagagcttataggatgtagccgtgagacgctgaatgcctggcagcgtaagggttacattaccggataccgcaaagccggactggtctattacagcaggagtgagcttgccgccgctccggttgtgcagaattttattacaataaagaagggggaggagatgagatgtctgataataataatcaatatatcccaatggtccatatcgtagacaggaacaaacgccgtgaacggctggcgtcccgtctcgaagtctgtgcagaccgtatctgtgacctgcaggaccggttgatggcgggtattaccgccttgagacctatcgagtacgaccgcctgctggatgaataccgcgcggagctggtgcgttacgacaacatcgaccgggaactccggcaattggaggaccctacgaaaacagaagagtacaggtcctatcaccgcaatgccagcaagcagcagaaaaataaaatcaactattaaattattaaccctatcaaaagagcaagaattatggcaagaacaaagaaaacagtagtcagcggcatcagccgcgagcaggcagagcaggccttcgcagattttgcggcggccgatgccaaagtacagaacctcacctcaaaaatggaccttgagatgacccgtatccgcgagaagtatgcggaccagctggcagaactgtctgccacaaaggaaaagaacttcgacatcatgcaggcatacgccgtagaaaacaaggaagaactgttctccaggaagaaaagcctggagagcgcccatggcgtattcggtttccgtaccggcacaccgaagctgaagaacctgaaggggttcacctgggcggcagtgacgaatttatgcaaggagcttttgccgcagtatatccgcaccagtgaggagcttgccaaggacagactgctggctgaccgtgagaatcctgacgtggtatcctatttcccgaagatcggtgtgcaggtggtgcaggaagagaccttctatgtggagcctaaaaaggagagtgatgcggttgagcagtgagatgagggagatacatcgttgttaccggtaccgtccccgcggtcggtgctgggcggtgtatctcgatatcacctaccgtcagggtgacagcttccctccgaggacatccactcttggcaccaaggtgaatgaatatccgaccagggaagaggcacggcgcgaggtgtacagactgaacggctggaattatgaaaggagaaaaagaacttaatacagaacagaccatgagcaagaaacagaacggggtgctggtaacggcgccccacttcggaacgggacgggagaccgtcggagaattcccggggtattcctgcggctattgtcagggcaacggctatttccagggggatatcacggtaaaggacacggagctggtcccttgccccaagtgtggcggcactggcaaagtgaagggcatcgttacggtggactgggtaccggacggggaagtgaaaccctgcctcagagggaattcaaacaacatttaatcactgaagtcttatgcgtattcccgtaaaatacattgtccagatagacaatttccatgtggcggatttcatcttctactggaactattatgaccagccctgctccctgcttctgcagaagcccaaaacggaagggcttaccgccatcaggttggtagttgacagtgacgaggccgccagctttttgctcagggcgaaggagaagacgggatgcaggctatatcgggttgactaaaggcaattcaaaaatgaataagaaaataactcaaatataaaaaagaaatgaataaaaaaggaagcgggaaaaacccgctccctccaaaaaattatttttcaaccctgccaagataaacgttttgaacgtctccataatagtttatattggtgatgttgtatattattgccggggttgttttctgatattttttggtaatataatttgataataaatttgaaataaccccagctgctatacttaatagtagtggtgtcatatttttatcaatatttaatttgacaataatcgtacttggaaggatttgaacctacatatccatttatcagatggagcttatccattcggccacaagtacaacaacgatgcaaaaatataaattttaaaataaaatttatagtgtatggcaaagatttatgtagcaagtagttggagaaactcatatcaacaggatgttgtatcgtttctcagaaataaaggtcacgaagtatatgactttaggaatccccctcatggcaatggtggttttcaatggtctgatatagatcctaattggcagcaatggacaacagaacaatacagagaagctctcaatcatccgattgcacaaaaaggatttaattctgatttcaatggtatgcaatgggctgatgtgtgcgtaatggttcttccttgtggtcggtcagccaatacagaagccggatggatgaaaggtgcaggcaaaaaagtgatggtttattctccggaaaaagaagaaccagaacttatgtataagatatacgattttgtgagtgatagcatatttcgtatcaatgatgagataattggagtataactgataagatatgaacccaatggataatgagttacaatgcaagaaatgtgggaagccgataaaaggtggttgctataatgttcccgatggacctttttgtgtggattgctgggaaaataagatcagtgagaaacttaaaaaggattatgagaaacaagccttaaaaagattgcaggctatcggtatcggttttaaaactgacgtataatgaacagaacaagactggtgcttcgttggctgctcatccccttgtggttcgccatattcatagcctatctgccgatatggtatctgcaaatgagctggtactatttctgctttcaggattattgggatgcttttctggtattatgggacaaggccatgctgtccatgaggttgaagacacgccgatgaatcctcgaaaggccgccgtatgattaatatggcggcctttgttgtgtatatatgccgttattgttatctttgtatcaggttttcagggtatttatggtaacgattgatattttcggggtatgggcaatcagttagaactttttccgggcaatcctcttggtttcaacggcgagtgcggcaagctttcgaccactccgctacgccgtacggcttccagccgcagtgagcgtatccggctgcgcaaccgtgtgatgacggcccgtctttactattggcgtgaaatcatgcgccgccgtcttgacgatgtgattgtcattcttgcggagaaggagttcttcgttgacgagcgtacgatcaacaacgcctggctcgaatgttccgagttcttcgagcacctttgcagcacccacaccacggcacgccagctccagcggatgtatccctgctggaagtggtagaaatcatattctgtcaataaactccgccatgtatacagcctcgtatactttcagcccgtccggtcgtttctgcggccggcagctcttgcgccggaatgacttgctgcagttgtccatgcggtagccttgcaacgctttgtgaatatcctccaggaaatcgatgcgcgcaaacgccacatcctggacggccacgggtttgtttgcattgaacgaggcgcagtcattgaaacctatcttcaggcttacagcggcctctacacgttgtatcgacgcgtgtgcgactgcgatgttgtccgcatcggggtaggaaagttccaccaggcagcaggggaaggccacgggcggtcggctgtccgaaaagtcgagttgtccttcgtcggcatccacccagcgcagtgccggcacttcctgacgtatgcggtccatgaccgctttgagaatttcttttttcattgttccatgatgtttttaaacagtagtccgatatctttcttcaatatgcggttcagttcccggctttcgcccaggaactgccgccggggaatcaaagccttccgggtgtgttgctttacaacgtactgtttgcctttcctgccggtgcggctgtgggaaggaaccactacgctgccggagaacccctcgttatgggcacgtgcatacggcaccctgtcaccaccggcagtaatgaccaccttgcgggcgctgatcccgtctatgtcgatgctcttgcgcagggctccgctctgtacaagcagcgtcccccttccgggtctgtatcttttactccatggcggccacggctcaccgtcaaatgatttttcggagaaacgttccaggaaataccgtttcgccgtggaagccaccgcctcgggcaccgcctccatggcctctttcaccctttgttccaattccttgccaaaatccattgccttacgttttaaaatggctatatttgcatcgaagtcctgtcctgacggggagacaacacgtatccaacaccccgggggtgcaagggggatttgcaaggtctgagaatcgacagcgccaggcaggatcagccccaagaaggagtgcaagaccggctatccaatccggacgggcggagaagcgacgggatcgtttcacctttacggttcggacggaggcgaggatgcactccgacgcttttttatcagcagccctctgcggcgtttgtcccatatctcctttttaaggtttaccttccggtttcccggtgtgcgtgtctgcatgacataccaggtcttcagcaccagtttttccccctctatccggtagtttacggccagaacctcgtcgttgtagtatttcaacagacaataggtgtcgagcaggtcatgctttatctcatcgttgagccacacctcgtccggggcgtgcagggtttccagcatggcatcccagtaccttatgcggttgtcccgtcccttgcctgcagtatggctgtcgaactgtctcttttcgacaaccactttccggccgtcgtaatccgtcagcacaattcttccgtcttcagcgtatgtttcccatacctcctgttcactccgctcactggcagggatattcccggaagcatccctcttcatggcctgtaccccgggcaggttccagcgttcggctgtcatgtccttcagataagaggaagcctgctgcgggaacttgcggatgtacatctggtcggcggtgaatatctgtgccgagtcacagcggttcactccccagccttgcgcctcggcctttttccattcggccgttttcaggaaatcgtccacacgccggcgcatctcttcaagatcgacctttacctggtgcttcatccgtccggtcacgagacacctgcatgcccaaccgttcggcgggtatattttgttccaccgcgggtcgttttcaggcaggatgaccccatgaagtttcatgtgttcctcacgtaccctgccgtcgttcaccgtcaggtactcccagaaaggatatacctttttcttcgtccgtaatttccggtaggtggacataccctcggctgtgagtaccgccgtttcgtattccgtcctctgccaggtcttgttgaatacttcagtggcttcctttgccctgcggtggaactcaccaaagctcccgctttcccggaagagtctgttcagttcctgtatctccgccagcgtcttggcagcggagaaatggaacaggttctgctccatagccatacggaacaggtcatccgacaatttgtaggccacgcccacatcggcatttctcggtccttcttcaaatgccgttcgaacagcctttaaaaagtcttcggcaaagaaccggaaaagctccggactgaaaccggccagttcaccgttccatacggcagcgatgagcctttcatccagaggggaggtatcactcatgcggattatgccagccccgcccggatgcggggctgctacgaaaaaagacctcacccgttcccacagtgtacattcatccttgttttttataggatcatgcgggggggcatcctgctttcccggtctggcctttgcagcgccatccgtttcgccatccgtttgggttggtgtccccagaaatatttcctcgccgtccttcggctcaggtataccgtatttctcatagccgtaactgcggggtatgggaatcatggtggaaagcgtcttcaggtcgttcaccgtgatttcgtccttcttgtccacgaacgagaacttgccgccatgcaccggatatcccctgctttcaagcagcggtacaaggtatttgttcagcatgcgtatgacaaaacgccggtcactgcggtgtttcttctcctgcacttccatgtggaccttgctctgtgagagcgacgcgccgtccctggtggtcatggtctgtcccagtacggttatgagtatctcctcgttgcaggcattgcggaaatcgttgtagagcgcgccgttgctgcttccgctgagtgtcgtctgttccacgtcactctctttggggatgacaatgtacggtgccgatcccgcttcctcgaacgcctgtatgagaagcctcctgctctgttcgtccatgctgttgtactttcctatgcgctgcggcatcccgaagagttccacgaactgtgcccagtccccgaatcccccgcgcttgtatatcacatagggagccactttcagcaagagccccagatcatcatcctctccccactgtatgatcatgccgtcatcgctgtaactgatcccgtccgtatcgtactggcgccgcagtatcagcttctctttgggacgtatgtgcttacgcggtatgctgttgaagtcgaacccgttcacgaaagaatattcgtctacggatattccccagaaaaggctccacatgatctctttcagctggttctcgaactccacagtatctatgagttccgttatccggggtacttcctttccgtttaccgtaaagttgatgtcgcagtcggttatcgcctctatgcgtttgccgatggcatccgtcacagtcccgtccatgagtatatcctcatacaggtcgtacagtttgctgcgcagccccatgtcagccgccctgagcgcacttttccatgtgcctatatcgtttattcccctgtgcacgggctgcaccagtatctgattatataccggcgtcacaatctttttgggcacagcgcctgcctgccgtttttttctcttcctgtttgtcataaggtttccgtttaaaagtggttgtcacgtttcctgttgcttccgaacgccatttccccgcagtgcctgcactcttgccgtcccggctgctccggcgctgccggcaggttcgggttctgcctgttctgattgttcctgagccattcaatggcgcggtcgtaacgtttctcgcgcatttcgatatccactccggcgttgcagatattgcagaagtgccaggcggctatgtcctttacaaaaagcagcaatatgggattgcgttcctttcccctggcggcgaatatctttcccgtgtcgtacttggtaagatatccctgcacctcctctatggcggcgtctatggccgacatcatcgccgcgtcatcaccatggctgatggtatccatatcctcctcatagatatgggttgtcatttcctctacttccaaataagccatatatgttcatttttaatggtttgtcacattctttttttgttatgggggcgtcttcctatccagtagcttccggcttccatgtgggcgttcagttgctggcacatgtaatatcccccctcgatggcatccggtccgtctgccggtgccggcagcccgtcatcgaacagcctgaactgctcctccagccgctgcatgtccgggttgtccttctcccgtatgttgaaaacgagccttcccgccctgttcaacggttccagattaccttctatacgtacgaatttatcaggtttgtcacgcccatcgggtgagatattgatgtaatgtcctttttccttcccttttgcaaggaaaagaggaacgaatacctgctggtagaacggatcctgcagtttgttgttttctatgtagttcctctgctgcgtcctttcccttacgtagtcccgctgatagtaataccagttcacgaactcgtcgttggtgacatgccgcagatatccggtatatacatacagcgttccctcgtatagccccatgagaaaattcgccttgaaggagttcttcttcgccttcctgccggtggtgttgctcggtgccgggtccccgtaactgacaatatatttgagcttgcctatgggcgggcactctccccagcgtatctccttgaagtaggaaccctccacgaccgggttgttgaaacactccttctgcccgctggcgaggctcacctgtgccagtacctcgtctatcgtctcctcagtgttcttttccggccatacggacgttccgaactggtaatccgcctgcggatcgggcttgcctatatccaccatgcgtatattgatgatatcccagtttccgataggtttctcccttgcggccagttcccttgccttgttgccggcacgtgagacgcagcagtccttcgcaatgacgttccccgtccagacggtaagcagcgcctcgctgatggagcgggtgaagaacagcgcctgctcgaaccagttccatttgttgttcacagtctccggattgcggcattcctcgtcggtatcgtagtcatccatgagcaatacgtccgggcgtacctcgtccatcttgactccgcgcggtgactgtccccatcccattgccatgaacgacacgcgggtgctgagggtgaaatagtcctccgtccatttgtcaccgatgaggttgccgtagaaatatttcagccgctcgttcgcctcgaactgtgcccggtactggttcagcagcttcctcgcgccgtcattggtcgccgatgccatgatgacgcaccgcttgttcttcttcacgatgaccaggtagagtactatgaacatcacgatggtggactttgccagctcacgcgcccagctcagcacttcgtaccagttcccgtctgaatgcccgatgatgcgcctgatggctttcttttggaatcctgcaaactcgtatttggcatatctgtagaacatgaacttcacccatgcgacagggtccgcttccagctcgcgcaatctccttgccttttcctccccggtcatggtgaagtcaacggcggtctgtgtgcgtatctgtctgagggtttcttcccagtcgtcggagagtgccctggtgtttcctgtcagtctttttcttgccatggcgttaccttaatttctcctttacaaattcgtcaaaataataactcagttcgattgccttctgcggatcacgcttgcgtagccagaaaaggatctgtttgctcacgctgatgatatcggctatgccgtagtccccttccattttggcgatggcggcggacagcttgttgatggtgtcggcctcggtggaagtggcatacttgtcaccgcgctcggctatggccttgttcatttccgctatctgcatgtagaggttgcgtatctgctcctccctcgtggtggtgactgccgcccgcagcatctcccagttgccctccctgctccatttgctcatggtgacagggctgacgcccaccttttcggctatctgcctgctttgcagttctccctgcatgtagagcatcttcgcccagtccttcttctgttggttcgttagtgtcttggacatattcattctcttgattattacagtacaaagttaggcagcgcataccgattaaaataatccgtctgtaatggtttccacctggcttgtaacagtttccagccggaaggaaactgttacagggggatttgcacaccttctttttatctctgaattttgcagcagacaaaacgggaaaagcaatgggcaaaacatatacattctgcgtacatgacgaatccgtaaacacttacggtttccgcatgctgacctcgggggccaatctggaagaattcagaaagaaccccgtggtactttacaaccataatgactgggacaccccgataggacgcggcgaaaacgtgcgtgtggaggacggcaggattctggtggatgtcgttttcgacgaggaggacgaaaaagggcgcacaatagccggcaaggtggagcgcggcttcctgcgcatggccagtatcggcgcctggcctcctgaagaggtcagtgatgaccccgcattgaaacttccgggacagacagggcctacagccataaagtggaccatgcgggagatgtccgtctgccccataggttccaaccataacgcccttgccatgtatgaccgcgcgacgaacaaacgtatagacttgtctgacgggcaggcgcttgtcagactgatggataaaaaaatcagtattaaccataaaaaagaggagaatatgagttatttgacacagatgctgaaattgtcggactccgcatccgaccaggctatccgggaagcagtacagggcctgattaccctgcgcgacagcctgcaggccgagaacgccacgctcaagagtgagaaacagacattgcaggagcgtgtgacggcctttgagacgaaggagaaggaagccaataagcaaaaagccgtcaccctggtggacgcggctgttaaagacgggcgtattgacgccaaaggacgtgagagctggctggaggactttgccgttgattttgcaaaggccgaagtacgcctcagctccatttccgtacgtcagtccgtcagttcccaggtacagactgaaggaaaggccggaggaaacgtgcagctggcagacatgtctttcaaggaaatcctggaaaaggatatgctcaaggaacttaaaaaggacaggaacctctaccgggagaagttccatgaagcctacggtaaatacccggaataatcattttataaacaaaagacaatgaagacaaaattcatcttttcactgctcacagcaatgctgttcaattttgccacctcaggtctgtttgcacagagtatcggcatcgaccataacctgatgttcagcatccagatggggctttcgctggttccgttgcaacttaccggctgtctggcagacgggctgaacaaggaaatctggattcccgagattatcgagaagttctatccggaaacctcgttcgtttccgactcgcgtgatttcagcatgtggaccgataacgagtacctgaacctgcaggaagcgggtatcgacccgagggtattcatcgacaacgaggtatatccgataccggtagtggcacgcggcgacaagccttacaagattccgatgaagcgcttcgatacggaaaacaccgtacatatcaacgccatcgaaatcgaggaatccgccgagaaacgcaggagtgtggctgccgggcatcagaagtccctgcagatgcagttctccgaactggccatctacaactgggctcccacgcaggacagcgagaccactccggtcttgaaaatcaacgacggcaatgccagcaagcagggcaccggctatgtggccatgacttatgaaaaggtcctggcgctctccacgcggcttgacatgatgcaggtacccaaggaaggacgaatcctggcactgcatccctaccatgccactgaccttcagctccaggacctggagatgttcaagacgttcttctccaccggttccatgttcggcttcaaaattcacgtcacttccatggtgcccaaatacaacggtactacgggcaagaaagtagaatgggacgctccggtacgcgatacggacgccatcgcctccaccgtatggtaccgtgacgccgtctgccgtgccaagagcatggaggacatgtactaccgtctgaacgaccctgaataccgcggtgatgtgctcggattcaatatgcgcggtatcgcgttgcccatcaccggcaagtatctgggcgccatgtttaccacgaagaaatcctaaccttgaaaattaaagtgcaatgagttacattaacatgaaatcgcggagaagctttgacttcttcgccccctatacagaagaaggtgaccgctgtgtacagataccgttcccggttgccgtaacccgcaaacccgaagacaagtccctggtacatgactgcaatccccagattgtggatattgcagccggaaccgccgcaacgactttcacgctggacacgcaagtccaggcaggttcgttgctcatcgtcaagaacgccagtgccaatgcccagaccatcggcgaggtggcttgtgccgcaagcaaggtcaccacgttgatgtacgacggaaacgcctacatcagtatcggaacttcagatatcagcgagtgatgagcagaggactacgcaacaataacccgctgaatatccgtctctctgccaccaccgtgtggcagggggaaatccggccttcgcaggaccgttcgttctgccagttcaggacgatggcctacggctaccgtgccggtctgaagttgttacagaactatcgccgcaaacacggctgccgcaccattgccgactttatccgacgttgggcgccacccacagagaacaacacgaacggttacatcagccgtgtgtgcaaggagatgcaggtgccggcaagctatatacccgatgtgggtgatcaaggtacgatgtgcgcttttgcggctgcgatgtcgcaggtggaaaacggagtacctgccgtgatggaggacattatcacgggttggagcctgctttaagtgattattgaaaactacttggccatgaacatggaaacgataatgcagattctccagtggcttgtgccgagcggcattgccggttccctctgggcatggttgagacaccgggagaacagcaaggtaatcgccgccaaggagcggaacgatgcctataaagaaatgtatgacaacctttcggggacattaattgaattgcagaatgagaacatcaagcttaacaaggcggtacgtgaactcaaccgtactatccgtaaggcttccacttgccgccattataatgattgtcctatccgtatcgagttgcagaagtcagggggaatcgatgcagaccagccatcataccgacagcctgcaaggcagaagcgggttcgctctccttcagcagcccgttcctcccagtgtggcgaggacggcatttccgacgaagatattgacctcgatacctgtggggacgggcttcagtaagcgtagtgggcaggcaacagtgaatgtcaaccgcatatcggaagacagcctggaggtgactgccacctgcgacagtctggcacgccaggtaataatgctgacggaagaactgacacgtatccgcaacgagacatcctcagcggtagagaccctgcctcctgaggtgataagggaacccaccggctggcagtggtttcaaatatggacaggtcggctggccgttgccgtccttcttctgatactgattaaacggcgattgaacagaacttaaaaaacaaaagaatttatggacggattaatttacggactggcgcacctcaaattcaaggggaaggaaatcggccttatcagcgaggaaggcctgcagcctgccgggagcgccccgagtaccacggacatctacgccgcgcaggtgaaggacggcccggtaatgacactcaccaccaatcccggcaagaaggcattcacctgcaccctgatagagctgaacgccgagagcctggtgaacaccatcggtggcacgaaggacgccaagaacaactgggagccccccgagaactgggaagccacgggcgtgatggacgtggttgccgacagcggcgagaccctgcgcttctacaatgccaaggtgaccggcagtgactttgctggcggcatcaactcctccaacgtgctggggctttctctgaacatcgagctgctgaagaattctgagggcaagcgcatgaagctcttcgccaagggcatagacccggatacgggtaccgaggctgcaggctaatggggggctgcccatgaaaccgaactttgaactggaatcccttgcggagagggtcatgtcggatgccggcatctcccttccgctacggcttcccggagggagacacatccgctgggtgatgcggataccaaccctggaaagccgctgccgcatggcacggatgtatctgaaactgggtgtgacacacgaggaactcagggcctacacctttgaacagaagctggagtttatggtgaagcacaccaggacagtgagccgcatggtggcatatgccatcgttcgcggcagtgtgtcgggcaggcttctgaaccgtccggtggcatggatgctgcgcagctgcatgcaccccgtcgccctggaagacgcctggatgattgcactcagtacgatgagtaccatccctttcgggaatattatcagattggccgaggtaatgagcctgacagcgcccaatctgagccaaagaaaacagaacgggagttaaaggggtacatggaacccgcccatagcccgttcggtctcgtgggacagatagcccgtgacacgggctggagtgtggactacatcatgcgcggtgtgaactgcccgatgctgatgctgatgtggcaggacttcccccgccatgtgccgggaaggaagaagaccacgcaggagatggttgccgagaggagaagccgcaacgggcagccggacatatctccggtggactatttacaacaattgcttgacgaggaggaaaacgctgatgaatcccattaaacttgaaatattcctggatgacaagacgctggcgggcatgaggtcggtggaaggcaacgtggccaacatggaggctttcaccaggcggatgatcgggcatctgaaactggagctgaaggatttggagaaggagtataagaatctccagaaacaagggcttgccggtgagagggagatggctgacatccaggcgctgaagggtgccatcggtgggttgaaggaacagcttaaggaatacgaggctgccaaaaaacgggcgagcgagacacccgtcataggcaatgaccccgcaccgaaactgaacagcgtgaagatgagcatggcgcagatagcccgcgagcttccgtcactggccatgggaccgcagatgttcttcctggcaatatccaacaacatcccgatgtttacggacgcggtgggcaatgccagaaaggagtacgagagactgacggcggcaggccagaaggcgacaccggtatggaagcaggtgctctcgtcccttttctcgtggcagactttcatggctaccgccatcacgctgactgtcgtatacagtaaagagatatgggagcttgccggccggatgcgaaaaggaagcagggccgccctggagatggcggatgcccaggaaaagataaatgactcgctggacacttccagcctcggcagacagcttgttacaatccgctccttgcaggaacgctggaatcagctgggcaatgacctggcggagaaaaagaagttcattacggacaataaggacgaatttgacaagctgggcgtgtccgtaagtaatgtggatgaagccgagaacgcgctggttgcaaatacggaggcctttatccaggccatgactttgcgtgcggaggccgccgcagcctttaagctggcagcggaagaggcggaaaaggcattgaaggcccagacggagatagaccggaaaaagaaggagggtccaagctggaaagacaaggcggtttcattcctgttccttgaccctcaatggactccgggctccatgtccgacaaacaaggcacatcaagggctgaaaccgtctggaatgcaggtatcgggaaacagaatgccattaaggaagtagcggagcaggatgcggagacttatacaaaaacatacaatgacaaactgatggagtccgccagaaaactgaaggaagccgggatcacggagaagacggacaaagaaaattccaaaggtaccagacttgactatgccgccgaacttgccgacgcccgcatccgtgcccagcggaaagtggaggccgcccgcatcgccgtgatggtggagggacgggaaaaacgcaaggcgcttgccgaaaaggagtataatgacactcttgccgccatcgacaaggaagaacgcgatacccttgccaaactggaaaaatcaaggaaggcgggcaggaaggtgactcccgaagaggagaggcaggtgaaggacggcgcgactgcacaacgcgcccttgcccgggtacaatacctgcaggacacctacaatatagaaaaggaatggcgcgagaagaaccgccaggcctggattgactacaacaaggaatacggcacctaccagaacaagcgccttgccatcgtgcaggactatgcactgaagatagcccgtgccgaaaccgaaggcgagaaggaatcactgaaaaagaaacgggacaacgacttgaaggaactggacttcggggaattcaagaagaccgtcaacctggctgacgtattcggcaatctggacggacagagtacggaagcgctttccgcgcttcgtgacaagctgaaagaatatatcaatggcgctgccaaagaactgcgcccgtccgatttaaaggaattgcaggatgcccttacggatatagacctgaagattgccgaccgcaagcctttccgggaattgaaacgttcgctggtggagtacggcgaatcccaggcggcagtggagagcgcccaggaagacctgaacaccgtaatggcaggaggtgaagtggttacaggtatgtatagggacgagaccggcagacttgtagccggactgttgacccaggagcaggctgaaaggaaccttgcagccgcccagaacaaccgtctgaaaaagcaggcggcattggcgcaatcgctgcagggtgtggcggtcaggatgtcgtcctacggtcaggctgccggtaccatcatctccacattggaaggcttcggcgtcactgttgacgagaatgtgaaaggcgtggtggaaggcttcaacaccatgagcgaaggtatcagcgggtttgcccggtcccttctcagcatggacgtcggcggcatgataagcggtgtggtgaataccgttggcggtgccgtcaagagcgtgggcagtctgtttggtgccgactggggaggcgaacgctcggaaaggcgctaccagcaggccaaggagaaatacgagagctatatggaagtgctcgacagggtcatttccaagcagaaggagcttgtctcctccatggaggcggacgacttcgccaatgcggacaactcttatgagcgtgcccgcgagctgctgaagaaacagcaggactatgcccgcgagatgggcaaggcctatctgaatgcgggtgcgagcaaggggttcctgggcgtggggtcaagcgcctcgcacggtaccgaccagcgcaaggatatttcccggtccgcctgggagcaagccaggaaggtgctgggcggcgacttcgataaatacggcataggggacggtcgcatgacggggctcttcgacctcccgtatgagcagctggtgagactccgtgatgaagcaagcggattctggagcgagctgcacgaggacacacggaactacctcgagcagattatcgagagcgaggaagcctggcaggaggtgcaggaagcccgcaaggaggcactgacgaagacggacttcgacagtttctacaacggcttcgtctccatgctgtccgatatggatgccacttcggaagactttgccgacagttttgagaagtaccttcagaatgccattttttccgcactggtggcaacccggtacaaggaccggatacagaaactgtatgactcatgggctgacatggccgacaaggacggactttcctcgacggaggtggagaaactgcgcggggattaccggaagataatcgatgagatgctggcacagcgggaacagataatggaggatttcggctgggaaggctcttccggcagttcaagttcccagtccggacgcagcgggacttttactgccttgacccaggagcagggtacgaagctggaggggctgttcacctccctgcaggaccatgccagcggcatgcacaagttactggaggaactgatgaagggacgcgctgccgaccatgacatattcctgcagatagcggagaataccgcttactgcaagatactggaagacatattcgacctcctggcaagcaaggaccgggacggatggaaaacgatatagaagtatgaaagatttgaccggatacatgaccgtcaacggcaaggacgcctggacggaatattccgctttcctctgtgaggacagacgggaggataacttcaatttcagtgaattgctgaaaccgcttgaaatgaaggggtacaccgctgtggattttcgggagcgtaacggtgaggagctgccggaggtattgccgtctccgtgttgtaaggccagggacgtgacgttgtacttcgccatatacgcctcttctccggaggaatgcgagacccgccgtgcggcattgatgaaggtcatgtattccggatgggtgaaccttcaggtaaagggcaggacatctgcctataagttctactacaagtcttcttccgacttcgacaccgtgacggatgtatccggcgggatggtcgtagagagatggaaaatgaagtttcgggaaccgaaacccggaactctttaaataacgattaaaagctgtttgaatggaactcaaaatctataaccggtccggagagttgaaactgacggtttccacatcctcctccaccacctggaaccaggaactgatgaaggaatactctgtgtcggcctcctttacccacccgtcctacgtgatgctggacgtggaggactatgtgctgctggagggagtgaagttcagtataaagaaggagtacaagcccaggcagaaggatacacagacctacagttattcggtgaagttctatgcccccatacatgacgcggagcaagtgaagtacttgcatctgaccgatggggcttataacccccagttcagtcttgacggtggtccccgcgagcacctgcagaagtgggtggagaacatgaaccgcatctacgggcgtgaggtctggcgcatcggcgacgtggtggtggcagacaaccggaccatcgaatacaataatgtcacctgctgggatgccgccacaatgattgccgaagcgttcggtacggaatggtggacggacggcttcaccttcaacctttcgcgctgcgagcatggggagccggtggaactgggctatatgcgggggcttacctcattggcacagtcggagaacagtgacagtgtaaagttcttcacgcgtctgattcccctgggctcgacaaagaacatcgacccctcccgttacggcttctcccgtctccagcttcctgaccggtcccaatatatggaccgtaacacgaactacggtctgtatgaacacgtggaggaggatgcctttgccggaatattcccccattatacgggcactgtgacggctgtgcgcagtgaagagaaggccggggatgacgggaacaagttcactgtctattatttcaaggacagcggcatgcagtttgatccgaacgggaatgagatagtcggcctggtgaagcatgtgtcgttccagacaggggaccttgccgggcgtgacttcgaggcaaactatgactcaaaaacgggggaatgggaaatcatcaacacctatcctgatgacaagacgcaaataccgggtggcagtctgataccggctgtcgggaatgaatatattccctggaacttccgtatgccggtggaatacgagacgcaggctgagctcgactacaaggccgccgtggatgactatctggccagatacagtgaggacgtgtccaagtatggcggtgacacggactatatttatatagaccggaaccggataccgttattgccgggacagcgtgtgcggttgctgagcgacaagtatttttcagcgtcgggcgggaccagggacacgcggatgacgaaagtcgtgcgcaaactggacaatctctccattgcaacaatagaatgcaccaaccaggtgggaaaaggctggaagtcgcgggtggattcaagtctgacggacttgaaatatatactggacaagcagcgggaacagctgtcacttgatattctgaaaagctgggacgggcggccggctactgactatacggtcatgtccgctctgagggtactgaaagagattgcgcaaaaagctctcagcaagaccgggaatgaccgtacagagtattccctggaggttggtggcagtttgacagtagatgacattctccatgcggccaaggctgtcaagttcggcgagttcctcaccggcatatccggagggtacatcgacaagaacggcaatctggagatggaggaaggcatattccgcaagcgtgtgtttgttccggagattgcctataaccgtgtgacctatttcaagggacgtatgtgtgcctctcccggaggcggatgtacggtcaaggaatggagcgacaacggtgacggcagctacaccataactcctgacctgaccgatgccgacgggctgagccagtttgtggatgacattctgaccacctacttcgtcaccaagaacgccgaaggcaagctgcaggggttcgaggagatgaagttccgggtgacttctgccgattacactgccaagacattcgtcatgacacccaagccgggtaccgactggaagccgggggatgcgatggtacttgcccaaacgggtaacttcacggatgaggataggcagacgtacatcctgattgatacggttaacggcaacaactgtattactttctttgatcacgccaatacttgggatgtcgagccggcacaagagatgtcgtggattggcaagaagaaaggcagaacagttcacggcataccggctgacaactattcggctgtttttcgccacgtcatcatgtccggcaagatatttcaggtggatgacatcaccggcgaggctttccgggtaccgctattcaaggggacgtggaaaaatggtgagaagtatgcctattacgatgaggtgacgcataacggcagctcatggatatgtgtcaatgagaaaggcacgtctacagagccggcagacggcaatgcggattggttgaaatatgcggctaagggagacaagggagatgtgggtaccggtatcaccaactgcggtgactggcagaccggcaagcatataccttacatgggtattaccaagatggccggacgtgtgtttttatgtgtcgctcctgatggtaccgacaatcctccgatgtggactcagacgaccaatgaggggcgccgtatcctgcagacccagaacggcggcaagtcctacggttataccattaccggggaccttaataccgctgagtatgagctgctggtggagaacggccaggatggtaaggatggaaaaggctatgagtggatattcaagcatacgacagagaatgtgacgcctcctacaccagccacctcgcaggtagatgactatgtgccgtccggctggcatgatgatccgattggggtgagcgagagcctgccatacgagtgggcttgttgccgcacgaagaaggacggtgtatggagtgcgttttcaccggcagccatctgggccaaatggggctttgacggcgagtcggccattgtagccgatttcgacaatgagatggaaagcattgccttgacatatgaggggaaaaccgttgcgcagtccgtgctcaaaacgaccgtcggcatgtggtatggcacgcaaaaactacagctcaagtccatctcatgcgtgaccccggcaggtgtcacggagagctacaatgtcaatacgggtgtgatagcgtttaccgtggcttccggcatttcaatgcctgcacgttcagaggttaggataaccgttacggctaccgtgcaagatacggatataagccgtgagctggtgttcaccattaccggggtgcgtgccggtaatccgggcagtgatgcgatactttataggctggtgccttccgtttcttcagtcagcaaacggaaggacggcacttatagtgtagccggggtgtcatgtacacgtaccaagtctgtaggcggtagcacttccatcacgacggatggcgtactgaaatacagtaaggacggaggcgcagaggtcgagatacagaacggcacgtccatctctccgaagaacttcacgacgcagttacaatttgtctattatgtgggtgggcaggtcgtggaccgggaaactattcctatggttgtggacggtaccgacggtaatcctggaaaaccgggcggtgacggcgaatcagtcaaggctggcggtgagtggagaaccgctaatactccatataaaaagctcaccatctgtacgatggggagtcgctcctggctctcaaaggttgagacgtcgaatccacctctatggactcagacaactcatgacgggaggcgaatcactcagacccagaacggcggcaagtcctacggttatattattaccgaagaagtgaacaccgacgaatgggaacaactgacatcagacggcagcatggtctatctcatcagtacatgcagcaatatacgggtgagcaatgccggttcgcttgttccttcagctttccgcgtctatgccaagcggacgcttggtagcgccacattgacttatccggacggatatctggccgcacgggggtacagcaacgggatatggagcgccatcgcagggccttcgagggcttccgagattacggtcaacgcttctgcagggtattcaactttctctgtccgctgttaccagagccaggctgacgcttcggcatggaatgacagtttcattgcggagatgtccgtgggtgtcagctatgacggttcaagcggacgggatgccagtgagccgcgtccgagaggttttttcgccaagggcaacacatatgtctggaatgaagattaccatgacatcgtactggccacattcaacaatcgcaccattccgtttcgggtacgggcttacggtacgtcggtcactgtcgcacctacctcgatagacggtgatgcgaattgggaggcggcacagcagtttatgtttgtagctatggatatggctttaataagaaagatacgtgccgatgaaatccttgtggatgatttggtggtacagaacgtattggcaagggataagaatggaaatgtcacttgtaacattgatggtgagactggagaagtcaatgttcaaggaaaaattacagcgacagcggcattcataaagatacatgggtttagttccaatgaaggctacttttacctgaaccccaattttggttcggattttggcaatgggcgtcccagtaaaataggccaaagtgaatacatgcttcccagctctgcccaatgtgtgggtatgaaaatatccttgatcatatataataattcttcagggagcacatatggctatgtgtcagttgtgacatcggacggatttaatgatatggagttggttgacggtcaataccattattgcaataaagctcatatcacagagcctggtgtttatgaattcatatcattgggaggagtctggatttcaaccaataaaaatggcatttcgtattcgtatgctgatttgggtgaccatgattacgaaaacccggttaattaacaaactaatataaatggaaagatgtatgaaagttttttatgaaagcaagttagcgaaatggctgctgtggcagggttacaacaccatcacattgggatgtttcgtcttcaccaagaaaagcaaggaggagatgaagcagagtacacttaaccatgaggcgattcatgtgcgccaatgggaggaatgcatgattgcatccgctgtgctgctgacggtaatcatgctgtttaccggattcaacttatgggtatatctgctatgcccgttgtggttctacctccagtatggtgtggagtacgcaatatcctacatgtatcacttatgccgtaaccggtgttggataaatgtaggtgataaggcttacggaaattccgcgtttgaaatggaagcggaagccaacgaagaggtagacggttatcttgatgtgagaactccttttgagttcttcagatattacggaaaaatttgatttataatttacaaaacgagttaattattaaaatgttaaatcgggtaatatttccatccggaaattatgccccttaaatgtgttaagtatggcagagaagcaggatattagagaagagcaaatgactgtaaccaacagtgtggattatctgcgaggcttgaaaggaaataacagcgtgttgattagcgtattaaatgctatatcgaataaggcaattgttaataaaggacatgttaagactgacgtccttaatatcgtcgggaattatgttgcatattcaacatcagatattgatggcagtggaatagatggttgtcttatctcgataaatccgaccgggcttgaaggtgcacagattaaagttgcatataatatgagcataattaaagttagagctgcctataatgtcgatggagcagcgaaatggtcagattggaagtcaataactattacttgaactaactatttatttcctcctttcgcttttctgccatactctttgccccttaaatgtaagaatatggcagaacaagatattagagaaaatacgatgagtggtggaactccggcacggctgcgtggactggcggcaaacggcaacagtatatcaccgacaattcaagaggtggcagaaactttcggtaaaggatatgctgcagatttgaataacgaaacagattatggaatttctggcatgtttaacgctgatactattaatcatccacccatttcatcagatattatttttggcatatactcaaatcatagagcaaaatatataacaggaggagtgtttttgtatcaaatagctgtcccagaaaatatgataggaatgtatgtaagacgatgctggaatgggaattggagcgaatggaagtcagtaactcttacttaaaactgtggaattattccacaataccgtggagcactccacaatattccacagtattgttaaaagaggattttgccttatattaatgaaaatgaatgcaatattgttgcgcaatcattctggtatcaattttgtactatggtttatgtcttaaaagttatcagtaacttgtagttgttatggttaggcaataggtattagttgcattaaggtttaaagacattttgttcatattgattttcattcggaaactctctttgtttggcattgcatcccggtctgtgaagtatcgggatgtttttacttagatggttgctgtttccgactaaatactgtaactttgtatagttagccgatatactacttaactaatactattttattctttggaataatgaaagtattctcggtctgtgaagatcggatgcttttggtgggtaatgccgccaattattccagttaagtgtttaggttttatgcagtctaccccatgaatggactgcattgacaagaagtattctgcccgttctgaccgagatggccggaacgggcataaccagaatgaaaatccacatggcttgcagaaccactatcataaggtaccaatcctttttaaaactatgtatgtttcagtgcttctgttgtttttgataaaaaagctaccatttgtcgtttttcgaccgaaagcaacacctttagtcccatctgtataatcacagtaaaaatttgaacctgcatctgacacaaaaccttttgaataggaaccaaaagcaaatatagcagttgctgcattgttgggggatgcaagcaaatacataccgtaccccaagtcgccaaggtctttttcctcttttgccgccaatgtaaagctataggtatatattcccatcgcattcattacctcttccaatgtcggtgatatactgttgccgtttgccgccagtccacgcagccgtgccggagttccaccactcatcgcattttccttaatatcttctgccatacttaatacatttaaggggcaaagaacacggcagagaaacataaagctcaatccgctatctaattttagtaaagcaaattgaactttatcctatgaatgtcaagataacgttagtagatgattcatttttgtttttaacaacatacttcgtatttgttccagtattaaatacgcagactttacctgaaacttcagagaagaaattaatgacacttgatggaactatcacagttccacttccacctccacacaaagttgcaacagccttatcgtgtgtctgagtggagttttgtatcataattaacccagagctatagggtaattcatactgttctcctggagcgaaaactttgttaaatctgaaaaatccacaactcttcaccaaatctgtaggagttaccttctgctggttgttccctttctcagtatacagatagtccgctacattgtttatcggaaactcattcattgctatatcctgcttctctgccataacattgcatatttaaggggcagcagatatggcagagaatttgtctgtttacgtatctgtaccaattgttaaagatgtttttacattcaaggacgaaacattaacagtttccccgatgccatgaaatgaaacatattcagacatagaaaatgcactactcattgttgttgtgtatgaagattcgtagcttcctgtaatatatatatctaaaaacagtccgttatcaacaaatagaatccgtgagcttccatttgtcttatgcgcatttaatttagcaaatggggaaattttttctccaaccacttctattccgataatgccataaaatgatatcccaaacgaatcgactgaaacgaatacagaggcgtttagaaatcctgtaattttttggatggaggcgattcttacagcctcagtattaattccaggtattcgaaacccttttaatatagatcgacttccactcttctcaaaaagacttgttttggttcttctactactaccatcacttgctaatgtacgaatccatgcaggatcactgtcttctaacatttcgttctcataaatatcttctgttgccatacactaccttttaggggcaaaggattcggcagagaaacataatgctgcttggttataatctatttatggaaaatctttgaacactacttcttaaatttgtaactcttatggttttactgccgtcttttatttgctctatattaaataaattccctacgatgttggacgaatcaataacggctttaaaatcttttttataataagctaaatggaataggaaactggagccattaagttcctcgctgacaaatagaaatattccataataaggaagaggaatatctacactgccttcccctacaatactatattcgactcttccttgtccagcgcttgccatccctttctcttccatagttgctactggcattgcgcttgccacctcttccaatgttggtgatatactgttgccgtttgccgccagtccacgcagccgtgccggagttccaccactcatcgcattttccttaatatcttctgccatacttaatacatttaaggggcgaatcctccggattatgaaaactttatgttcgatgctttattaattgcatataaattcttacttttaaaggagaaaaacagaatcctatgaattacggttacatcagagtgagcagtgagaaacagaccgttgaaaaccaacggtacgagataactgaatactgcaagcgcaaggggctcattatagataagtggattgaagagagtgtgtctggtgccaggcatcccaatgtgcggaaattaggcaagatactgaatacgatagacaaaggcgataccatatatgttacggaactttcaaggcttggacgctgtgcgtatatggttatagctatcatatctcattgtctgattgccaaagccaatattgtggaaatccgtgatgacaagcttattaaagatgattcagattctgtgcaagatacgtttttaaaggtcttatttgctcaaagggagcgagaagatatatcaaggagaaccaaagccggacttgccaggcgggtagccatggggatgaagcttggacgaaaacctggtgttcagaattcccattataaattgactggaaaggagcggttaataaaaaagatgtttgaatacggctattcaaaggctgccatctgcagaaggctacaatgcaatccggttactttggataggcaccttatcagaatgtgttattttctgccatgccgttgagttgcatatctttgcgtaaaaaatgatttacgcatacattagagtatcaacagacaaacaaactgttgagaaccaacgcttcgaaatcgagaagtttgctcgtatcagagaattaagtattgataagtggatatcggaaacggtatccggaaccaagtccgtccaaaaacgaaaattgggtccacttattaagaaactgaaaaaaggtgatacgcttatagcttctgaaataagtaggcttggtcgccgtttgatggaagttatgtcaatcctcaatacacttatgcaaaagaaaatcacagttctaacggttaaagaaaagtatgagctgggcaataatatccaatctcagatacttgcctttgcttttggtctgtctgctcaaatagaacgtgacttgataagtcagagaaccaaggaaggacttgcacgaaggaaggctgccggacagaaacttggaaggcacgttggcggtcataattcaaagtacaaattgacaggtaaagaaaatcttattcgaaccatgctcgaatatggttattccaaggcagctatttgtcgaaagttgaaatgtaatccgaaaacattgaacgatcatcttgtaagaatgaaataaaatctcatattttcctctatatttgtaatagtcatagaattctaaataggctttggggatttgggaagtgaaaaaagcccccggcctgttttcaaaagtaacgccaatcacttcaaaaaaaacaatacgcctatagcgcgcgaccgggggcaaataccctctgccgcactataggcgatttttattgttgaaatgattggcattgcaaagatataattttttattgtatgaaagtgattgaaatattaaaccttaattccgcaacactattacaaatataactttttaagtacctgagcaacaaaaagttgctcaggaatttgccatgtcagatttttcacctatcttagtgttgcaaatcaaaatatgtatcaaacccgacagacatggcaaaggtagcaattaaatccgagaaactcactccttttggaggaatattttcaataatggagcaatttgactccagactctcatctgtaatcgactcaaccctcggtatgagatgcaggctgtatggttatcaatacagcgaaatcatccgttcgcttatgagcgtttatttttgtggcggctcatgcatcgaggatgtcaccactcatctgatgtaccacctttcgcttcatccgacacttcgcacatgcagtgccgacacgattcttagagccataaaggaactgacccaggataacatttcctacacatccgacactggcaagacctacgacttcaacacggcagacaagctgaatacactgctcctcaattgcctattgtccacagggcagctgaaagagggcgaggggtatgacgttgacttcgaccaccagttcatagaggctgagaagtttgatgcgaagcctacatacaagaagttccttggttatcgccctggcgtggcggttattggcaacttgattgtcggcattgagaacagcgacggcaacacaaatgtccgtttccaccagaaggacacgctgaagaggttctttgaaaggtttgaacaaaacaagcttattatcaaccgtttcagagctgattgcggctcgtgttctgaagagatagtggaagagattgctaaacactgcaagaccttctatatccgtgctaaccgatgcagttcgctctacaatgacatctttgccctcagaggttggaagaaagtggaattgggcggcattgagtttgagctggcctccattctcatcgagaaatggaaagggaaggcataccgtcttgtgattcaaagacagaagcggatagacggcgaactcgacctgtgggaaggagaatacacctaccgctgcatccttacaaatgactacgagtcttccgagaaagagattgtcgaattctataacctccgtggagggaaggaacgcatcttcgatgatatgaataacggattcggctggaacaggcttccaaaatcctttatgggagaaaacacggtgtttcttctgcttatggcactcatacgcaacttctataaattcatcatggcgaggcttgacgtgaagaggttcggactcaaagcaacaagccgcatcaagacgtttgtctttaagttcatctctgtgccagccaaatgggtcaggacatcaaggaagtatgtgctgaatatctattcatgcaacaatgcttatgccaatgtgttccagaatgactttggataacaccgacaacttatagtcgtgattttgcgtattgcctcaagtcgcatggtggggtaaggggcatttatatgtctttatggtgacattcgatgcactgtgccccctttttactaacgatgcagattcttttcgcttctgtatcatattaggcgcgtagttgcggatttgaggttaaactttaatcgagaactattgaaaaggctccaagcagcgggtatccgtttggaggatgccagctatatagacctatacactgactatactcgccttctggatcagggtgagaaagtctcgtatgttgtagccgtactatctgaaaagtattcggtgagcgagcgcaaggtttatgccctggtaaagagattccagagtgactgtaagatatttgcagtatgaatgggctgccttatacaggagggtagtgtgagatgaaacagctcgcttatatcaattaacagggaaaaggctgcaaaaataatacagtgtaacttccagtaaaaattatgccttgtactttcttctattcaactttgtggcataaaacagaaaataaagtatggaggttcacaaaaaaacaactttaggtaacttgataataaaagaagttccaaagattttagccaaagaattaataatcgaacaccattattcacataagtggaatgatggtggtttcggcaagtttaattatggaatattcagagcggaagaacctgaacgatgtttaggtgttgcagtgtacggctttatgaaaaatccttctgctaagatttttactcaccctaatcccggtgcgtggatgtgtgagttgaatcgtatgtggatagatgattgtttaggtcataatgcagagagtatattaattgctgcatctattaaattattaaggaaagcagatcctacatgtgtagcggtacagagctttgctgacgggcgattaggatgtggcacaatttataaagctgccaattttacttattacggattccattatacggtattttgccgtaacaagaggtcaggagaaattatacacgaacagatattgacgaatacaacatccccaaccggctatctacgtaccaatatagcattattaataggtgatttggatatattccgtgtaaagacatacagatacatttatccgctttgtaagaagtttagattttgtcgtgagccacaaccttatccggcatacgataaaggtgaagaaccgacccaatggcaccgcaatacagacaaaataaaatccaatatcattaaactccttgataaaatagccgcgtaattctattatgtgcacactatcctcaagctatacaaagatacaaatttggaatggtttgaggtatttttaatctctttttgagaaccgtttaaatggcattggaaaataaataaaaaatcacaatttgttttgtgttaacaagtgcaaaacactcacaaagtgatttgaaaaagaatcacgaaacgttttgcggtttatacccgacctgaaccataacggggagatagagccggaagagtgggtgaaacaatgtccctgctttgatgcggcgactatactgacagaaccgccaccacccaatccggcatgcttataaaatgtttttattctctttcttcgtgctcttcgcgcgcacgtatatatataatgtatagttattttctctctttttcctttcttcaaaattgttcatgcgaaatgcatttatgaatcagtaagttacaaaaaagtttcatttttattaaaaaaaatgatagatatgtttggcttgtattgttaaatcctatacctttgcacccgctttccaagagaaggaaagtggtaagattgaaatactgaaacagaagtgtggaaggtgacacagagaaataaaaagagataaaaatatttttcgaaaaacatttggaacttattaataattctccttatctttgcagtccgactcgcaaagaaaaagaacttttcttgttttgcttttcttatccttgtttaaaggatttaaaaatacagaaaaaagaaaaaataaaaaaaacttccgaaaatatttggaagatatgctttaaagttcttacctttgcatccgctttctgaaaagaacagcaatcgtgaaacgagcgatctttgaacagatttacataaacaatacaagtagtacaagagcaggtgcttcgcaaattaataaatggaaactaatgattaaggcgcgtcgtacctgggtaaaacaaaagaaccgtcaatatctgttttatataaataggtaaagataaactttttgaattcgagcgtcctggacagataattaagctgccgcattttaatttttaatttgcgcagtcaagatacttttacaatgaagagtttgatcctggctcaggatgaacgctagctacaggcttaacacatgcaagtcgaggggcagcatgaacttagcttgctaagtttgatggcgaccggcgcacgggtgagtaacacgtatccaacctgccgatgactcggggatagcctttcgaaagaaagattaatacccgatggcatagttcttccgcatggtggaactattaaagaatttcggtcatcgatggggatgcgttccattaggttgttggcggggtaacggcccaccaagccttcgatggataggggttctgagaggaaggtcccccacattggaactgagacacggtccaaactcctacgggaggcagcagtgaggaatattggtcaatggacgagagtctgaaccagccaagtagcgtgaaggatgactgccctatgggttgtaaacttcttttatacgggaataaagtgaggcacgtgtgcctttttgtatgtaccgtatgaataaggatcggctaactccgtgccagcagccgcggtaatacggaggatccgagcgttatccggatttattgggtttaaagggagcgtaggcggacgcttaagtcagttgtgaaagtttgcggctcaaccgtaaaattgcagttgatactgggtgtcttgagtacagtagaggcaggcggaattcgtggtgtagcggtgaaatgcttagatatcacgaagaactccgattgcgaaggcagcctgctggactgtaactgacgctgatgctcgaaagtgtgggtatcaaacaggattagataccctggtagtccacacagtaaacgatgaatactcgctgtttgcgatatacagtaagcggccaagcgaaagcgttaagtattccacctggggagtacgccggcaacggtgaaactcaaaggaattgacgggggcccgcacaagcggaggaacatgtggtttaattcgatgatacgcgaggaaccttacccgggcttgaattgcaactgaatgatgtggagacatgtcagccgcaaggcagttgtgaaggtgctgcatggttgtcgtcagctcgtgccgtgaggtgtcggcttaagtgccataacgagcgcaacccttatcgatagttaccatcaggttatgctggggactctgtcgagactgccgtcgtaagatgtgaggaaggtggggatgacgtcaaatcagcacggcccttacgtccggggctacacacgtgttacaatggggggtacagaaggcagctacacggcgacgtgatgctaatccctaaagcctctctcagttcggattggagtctgcaacccgactccatgaagctggattcgctagtaatcgcgcatcagccacggcgcggtgaatacgttcccgggccttgtacacaccgcccgtcaagccatgaaagccgggggtacctgaagtgcgtaaccgcaaggagcgccctagggtaaaactggtgattggggctaagtcgtaacaaggtagccgtaccggaaggtgcggctggaacacctcctttctggagtgacgtctcgactcgatcgttggttcttgaagttatgcttccataagaacctcttgtactgcgcgtacttgtttattaaaatatacgagaaaagtagaagccgagccgtaaggcgagggtttgactgacagtcctatagctcagttggttagagcgctacactgataatgtagaggtcggcagttcaactctgcctgggactacttcaaagttgaaaactgaaaattgacaactgaaaatcgggaactctccggattttccactttccactttccgttttccacttataagaagggggattagctcagctggctagagcacctgctttgcacgcagggggtcaacggttcgaatccgttattctccactccgttttgattattgttttataattgaaacaccgttctttgacatgatgtgaccaaaaaaaagtaaagttaaaagctgaaagtatatatcgaccatacgtgatcggtaagacaaaaagtaagtaagggcacatggcggatgccttggctctcggaggcgatgaaggacgtgataagctgcgataagctgcgggtaggtgcaaatgacctttgatccgcggatttccgaatgggacaacccgatactttgaagaagtatcatcctgcattgcaggaggctaacgcagggaactgaaacatcttagtacctgcaggaaaagaaaataaacaatgattcccccagtagtggcgagcgaacggggaatagcccaaaccatccatgttacggcatgggtggggttgtaggaccacgccgtggcaagaaagttggtgagcagaatgttctggaaagtacagccatagagcatgacagctgcgtatgcgaagccaagcgaagcctagtggtatcctgagtagcgcggagcacgaggaattctgcgtgaatctgccgggaccatccggtaaggctaaatactcccgagagaccgatagtgaaccagtactgtgaaggaaaggtgaaaagcacttcgaacagaagagtgaaatagttcctgaaaccatgtgcctacaagcggtcggagcaccttctggtgtgacggcgtgccttttgcataatgaacctacgagttactttttccggcgaggttaaggatttcagatctgcagccgaagcgaaagcgagtctgaacagggcgtatagtcggaaggagtagacgcgaaaccaagtgatctacccttgggcaggttgaaggatgggtaacaccatctggaggaccgaaccaataagcgttgaaaagcttctggatgacctgagggtgggggtgaaaggctaatcaaacttggagatagctcgtactccccgaaatgcatttaggtgcagccttgacttatactggcatgaggtagagcgactgataagatgcgagggcttcaccgcctatcaagtcttgacaaactccgaatgcgtgtcagttctatgtcaggagtgagggcatgggtgctaaggtccatgtcctaaaggagaacaatccggaccaacagctaaggtcccgaaatgaatactaagttgaactaacgaagtcagattgctaagacagctaggatgttggcttggaagcagccattcatttaaagagtgcgtaacagctcactagtcgaggagtttggcgtggataataatcgggcataagtattctaccgaagctttgggatgagaaatcatcggtaggggagcattccactcggcgtcgaaggtgaggcgcgagccttgctggagcgtgtggaaaagcaaatgtaggtataagtaacgataaggcaggcgagaaacctgcccgccgaaagactaaggtttcctgatcaacgctaatcggatcagggtaagtcgggtcctaaggctcagccgaacggcgaggccgatggcagaaccggttaatattccggtactacctgtgggagtgacgtggagacggagtcgtgacagcgccgcggactgacggaatagtccgttgaagggtgtagatgctgattgttccaggcaaatccggagcaagagtcgaacctgatagtatggagcgttcttagaacaatccaatagtgcgtgtaatcatacttccaagaaaatccgctaaacttaatcctgcaggtacccgtaccgcaaacggacacacgtagtcgggttgaatatactaaggcgcttgagtgattcacggttaaggaactaggcaaactgaccctgtaacttcgggataaagggtcctcgcttaacggcgaggcgcagagaataggtccaggcaactgtttaacaaaaacacagggctgtgcaaaattgaaagatgaagtatacagcctgacacctgcccggtgctggaaggttaagaggagatgtcatcgcaagagaagcattgaattgaagccccagtaaacggcggccgtaactataacggtcctaaggtagcgaaattccttgtcgggtaagttccgacctgcacgaatggtgtaatgatctggacgctgtctcaaccgtgagctcagtgaaattgtagtatcggtgaagatgccgattacccgcgatgggacgaaaagaccccgtgaacctttactatagcttaacattgaatttgggtaattgatgtgtaggataggccggaggctttgaagcgggcacgccagtgtccgtggagccgctgttgaaatacggccctttgattatttgagttctaacccgttgttgcggggacactgtttggtgggtagtttgactggggtggtcgcctccaaaagtgtaacggaggcttctaaaggtgccctcacgacgattggtaaccgtcggcagagtgtaatggcataagggcgcttgactgggagacttacaagtcgatcaggtaggaaactagagcatagtgatccggtgtttctgtatggaaaggacatcgctcaaaggataaaaggtactccggggataacaggctgatccctcccaagagctcatatcgacggaggggtttggcacctcgatgtcggctcgtcacatcctggggctggagaaggtcccaagggttgggctgttcgcccattaaagtggcacgcgagctgggttcagaacgtcgtgagacagttcggtctctatctatcgtgggcgcatgaaatttgcgtggctctgacactagtacgagaggaccgtgttggactgacctctggtttaccggttgtgccgccaggtgcattgccgggtatctaagtcgggattggataagtgctgaaagcatctaagtacgaagccagccacaagattagatttctcagggtcgttgtagactacaacgttgataggatgcaggtgtacaggcagcgatgtcatagccgagcattactaattgcccgtccactttttgccttccgtgtatggaggtatatacgttcagcaatatatggacactttacttttttctcatcatgtctgccttattcaggtgactatagcaccggggttccacctcttcccattccgaacagagaagttaagcccggtcacgccgatggtactgcgtaacagtgggagagtaggtagtcgccgttttcagaagaagcctccgtgtctgataaggatacggaggctttgttcgttttatatacctccggaactgctccccttaatccctgtcatgcgttgttgcagacgtatttttctgcttcttttgtcattcttttgttatcattacagaacaaagttggtgtaaaatgagttttttttggaagagcaagaacttttcttcctttctttctattcaatatcaaatggatttttgtaaatttggcgtgaatctaataggaagggaaaaaatcacgcaattaatattgtaatataaatcatataataactcctgcaaatatggaaaacaagattcaagagctgaccgataagatctaccgcgaaggcgtagagaaaggaaacgaagaggcacagaaacttatcgcaaaagctcaggaagaagccaagagaattatagaggatgctcacaaggaagcggattctatcgtggctaccgctcataagtctgccgatgaactggcagagaatacaaaatctgaattaaagttgtttgccggtcaggctgtgaatgctctgaagtccgaaatcgctacgttggtgacggacaacattgtgaatgccgatgtaaaggcatttgctgcaaacaaggattatcttaatgccttcatcgttgcattggcgtccaaatggagtgtgaacgaaccaatcgttatctctactgccgatgcggaaggcttgacaaaatatttcgcagcgaaggcgaaagacctgctggacaagggtgtgaagattgagcaagtgaatggcatcaaaaccttgttctccgtatcgcctgccgatggttcgtacaaggtgaactttggcgaagaagaatttatgaattacttcaaggaattcctgcgtccgcaattagtggaaatgctgttctaaaaactcccacaggattatgagtaaatactattacttggtagccggtttgcctgaacttactctggaagacagtaaactgagctatacagtagccgatttcaagacggaactatatcctgccttgtcggaagatgataaaaagttgatagatttgttttatctgaaattcgataatgcgaatgtcttgaaactattgaaggataaggatgctgccatcgacccgcgcggaaactattcgtcggaggaactggtggaatatatctcacaactgaaggatggcgacgaagtctctgacagtgtattcccatcttatctctctacgttcatttccgaatacttcagcctgcctgccgaggacggtttcttgtatgaagaccgcctggcagcgctctattacgcctatgctatggaatccaggaatcagtttgtgtcttcctggtttggcttcaacctcactctcaataatatattggtggcgctcacagcacgtaagttcaagctggacattgctccgctgattgtgggtgatacggaagtgtgcgaggctctgcgtacttccaatgcccgtgacttcggtctgggtactgaggtggattatctggagcagctggtgaaaatcagtgagacggaggaactggtggaccgggaaaagaaactggaccagcttcgctgggactggatggaggaggccacattcttcgattactttaccgtggaacgtctgtttgtcttcctgctacagctggagatgatagaacggtggatttcgttggataaagagaagggtaaccaactgttccgcagcattatcgctgccttgaaagacgaggtgcagatacccgcagaattcagataaaataaacaactaaaaatatatggcaacaaaaggaactgttagtggcgtaatagccaacatggtgaccctcgtcgtcgacggaccggtagcgcagaatgagatttgttatatctcgaccggaggagacaagttgatggcggaggtgattaaggtagtaggtacccaggtctacgtgcaggtatttgagagtacccgcggactgaaagtgggggccgaagctgcgtttaccggacatatgctcgaagtaacactggggcccggtatgctttcgaaaaactacgacggtctgcaaaacgacctcgataagatggacggtgttttcttgaaacgcgggcaatatacctatccgctggataaaggaagcaaatggcattttgtgcctttggcaaaggtgggcgaccaagtggaagccgctgcctggctgggacaagtggacgaaaacttccaacctctgaaaatcatggtgccttttgaacagaaaggtgtgtgcaccgtgaaatcaattgcaaaggaaggtgattacagcattgaggataccattgcagtgctgacggatagcgaaggtaatgacatccgggtgaacatgatacagaaatggcccgtgaagcgcgccatgaccaactataaggaaaaaccgcgtcctttcaaattgctggaaaccggtgtgcgtgtaatcgacaccgtaaacccgattgtggaaggtggtacgggttttatccccggtccgttcggtactggaaaaacggtgcttcagcatgccatttcaaaacaagcggaagcggacatcgtaatcatcgctgcctgcggtgagcgtgccaacgaggttgtggaaatctttacagaattccccgaattggttgacccgcatacgggacggaagctgatggaacgtacgattatcattgccaatacttcgaacatgccggtggctgcccgtgaggcatctgtctacacggctatgacgattgcagaatactaccgaagcatgggattgaaggtactgctgatggcggactccacttcacgttgggcgcaggcattgcgcgagatgtccaaccgtatggaggagttgcccggtcccgatgccttcccgatggacttgtcctccatcatctccaacttctacggccgtgcgggttatgtgaagctgaacaacggcgagtccggttccattactttcatcggtacggtatcgcctgccggtggtaacttgaaggagccggtaaccgagaatacgaagaaggtggcacgctgcttctatgcccttgagcaagaccgtgccgacaagaagcgttatcctgccgtaaacccgattgactcgtattccaaatatatagaataccctgaatttgaagagtatatcaccaagcacatcaacggtgagtggattggcaaggtgaatgaaatcaagacccgtttgcagcgtggtaaggagattgccgagcaaatcaacatcttgggtgacgacggtgtgcccgtagagtatcacgtgactttctggaaatcggaattgattgacttcgttattctgcagcaggatgcctttgatgaaattgatgccgtgaccccgatggagcgtcaggaggagattctgaatatggtaatagaaatctgtcatacagaatttgagttcgacaacttcaacgaagtaatggattacttcaagaaaatgattaacatctgtaagcagatgaactactcgaagtttaagtcggaagaatacgacaagttccataagcagttgcaggaactggttgaggaacgtaaagcctaaggatgtactatgtgactatttacaatttactatttgccttgcggatgcaggtgtacggaggttgtagataggaaaatagtagaataggatggcagagatttaaatagtaaatagtaaattgctaaattgtaaataaatagatggcaacaaaagcatttcaaaaaatatataccaagattactcagattacgaaagctacgtgttcgctgaaggcaaccggagtggggtatgacgagttggcgaccgtaaacggcaagctggcccaggtggtgaagattgccggcgacgaagtgactttgcaggtgtttgagggtacggaaggtattcccaccaatgcagaggtagtattcttgggcaaggctcctacaatcaaagtgagcgagcagcttgccggacgcttcttcaacgcctttggcgaccccatcgacggtggtccggccattgaaggcgaggaggtggaaattggcggtccatccgtgaatccggtgcgccgtaagcagccctcggaactgattgcaaccggtattgcaggtatcgacttgaacaatacgctggtgtccggacagaagattccgttctttgccgaccccgaccagcccttcaaccaggtgatggcgaatgtggctctgcgtgcggagactgacaagattatccttggcggtatgggtatgacgaacgatgattacctttacttcaagaacgtattctccaatgccggtgcgctcgaccgtatcgtcagctttatgaataccaccgagaatcctccggtagagcgtctgctgattccggatatggcactgacggcggccgagtattttgctgtaaacaataatgaaaaggtgctggtgctgctgacggatatgacttcctacgccgatgcgctcgccatcgtatccaaccgtatggaccagattccttcgaaggactccatgccgggatccctttattcggacttggcgaagatatacgaaaaggcggtgcagttcccaagcggcggttccatcacgattattgcggtgacgactctgtccggtggcgacattacgcatgccgtgcctgacaatacgggttatatcacggaaggccagttgttcctccgtcgtgacagcgacatcggtaaggttatcgttgacccgttccgttccttgtcccgtctgaaacagcttgttacgggcaaaaagacacgtaaggaccatccgcaggtgatgaatgccgctgtacgtctgtacgccgatgccgccaacgccaaaaccaagcttgaaaacggtttcgacctgacgaactacgacgaacgtacccttgcctttgccaaggactactccaaccagctactggccatcgatgtcaacctcgataccacagagatgctcgatgtggcatggagtctgttcggcaagtatttccgtccggaagaggtgaatatcaagaaagagcttgtggaccagttctggccgaaagcaaactaaataaatgtacgattagacgatttacggtttacgattgatattactgaaattgtaaatctgtaaattgagaaattgagtagcttcagtcgtctaatcgtaaatcgttaaatcgtaaataaaatggctattaagtttcaatataacaaaacctcgcttcagcaactcgaaaagcaactgaaggtgcgcgtgcgtacactccccattattaagaataaggagagtgccctgcgtatggaagtgaagcgctgcaagggagacgctgccgcgttggacgcgaggttggaaaaggaaatccaagcttacgaagccatgttcgccctttggaatgagttcgacgcttcattgataaaggtcagcgatgttcatctcggtgtaaagaagattgccggtgtacgggtgccgttgctcgagaatgtagatttcgagatacgcccttacagcttgttcaatgcgcccaaatggtatgcagacgggctgcatttgcttaagtcactggcacatactgccatcgagcgtgaatttactgttgccaagttgaacttgttggaacatgcgcgtaaaaagaccacccagaaggtgaatctttttgagaaagtacagattccgggttatcaggatgctctgcgcaaaatcaagcggtttatggaagacgaggagaacctttccaagtcatcgcagaaaatcatgaaatcccatcaggagaaaaggaaggaggcagaggcatgattacgaaaatgaagaagctcacgttccttgtgtatcataaggagtacgaagcatttctggcacaaatccgggaactgggcgtggtgcacgttgtggaaaggcagtgcggcgagatggacgacaccttgcagcaattcatgcagaagcgtacgctctacaagaatatgcttcagagcatgcacaccctggcagataaacagccggaagaaaaggtgcataaagagttgtcggccgatgctctggtgaaattctacgaggacttgcaggcgcggatacaagacttgaaccagcagattcccgccatcgacaaggatgtggcgcagatggaagtctggggcgatttcgattggagagccatccgcaagctggaagatgctggttggttcgtgcagttctatacctgcccggagaaagactataacgaagcgtgggcagaggactacaatgccatcgtggtgaaagagaacggcggacatctttatttcgtgaccgtcactccccaaccggtagaactggatgtggaaccgctccgtctgccttcactcagcctctccgaactgagccggaagaaagccgatacggaagaggcccttgtgcaggcacatgccggattgaaagaattctgcaaagcgaattactgcacgttggagaagtacaacctacagctccaggaagagatagacctgctgaaagtcaagctgaacagcgaacatatggcagaaggtgccgtagtgttgatggaaggctggattcccgaagactgcgaggcggatgtgaggaaacttctcgatgaaagcggcacttattatgagataagggctgccaagcgcgaggacaatgctcccatcaagctgaaaaacaacgcctatacacgcatgtacgaagtgcttaccaaaatgtacggtatgcccgaatatgccgagttcgacccgacaccgatacttgcgccattcttctcgctcttctttgctttctgtatgggagatgcgggctacggtctggtactaattgcactcgggttcattttgaaaaggaagatgtccaagtccatgaaaggcatgatgaacctggtgattacgttgggtatatttacgtccgtcatcggtgccatattgggaaccttcttcggtgtaagcctctttgacctggagatacccgccaaactgaaggaattcatgattgtgggtaagataggtgagactacctatgacaagcaaatgctgctggcgttgattatcggtgcggtgcacatctgcattgccatgacggtgaaggccgtgggacagaccgttcgtttcggcttcaaggagtcgctcagtgcctggggatggctgttgctggtggtgggatttatctgcaccggcggactttccttcttcaagataatttcggaagacgtgtctacgtgggcatttatcgtgattggcggtgtttccgccatcggtatctacctgctgaacaatatccaccggaatgtatttgtcaacatcggtgccggagtatgggatacctataacatggcaaccggattgatgggcgatatactttcctacatccgtctctatgccctcggcttggcaggcggtatgcttggaggcgtgttcaaccagcttgccttcatggtgaacgatgctgcaggtccggccctgggatggctgttctgcggtctgatactgatattcgggcatacgctgaacattgccatgtcttgtctgagtgcctttgtacacccgctccgtctgacatttgtggaatacttcaagaattccggttacgaaggtaagggcgaagcctataaaccttttacagtagtaaagaaataaacaaattaaaaaacaaataaaaatagaaacattatgaatgaaattttaggttatctcggtctgggcctgatgttggcccttgcaggaattggcagttgcttcggtacaactatcgccggtagtgcggcagaaggtgcgttgaagaaagacccttccaagtcagcaagttatatgattttgtcagcccttccggctacgcagggactttacggcttcgtggctttcctgatgtccatgggcagggattttgctacggacggccctttgatgctgggcatcggactgggtgtggggctggtatgcctgttctccgctatccgtcagggacagatttgtgctagcggtattgtgggtatctcccagggacacgacgtacagaccaatacaatgatttacgccgcgcttcctgaattctacgctattttggcgctggtagctgcattgatggtataatccggattataagaaaataaaccccagggatttacaattgaaatccctgggtttttttgtttaaattcctggggcttcaactgaaaactccaggaattcttttttgaaacttcgggaattttagacgaaaaaagcatggatgggcgagtcaatggggcttttgtggctaaactatgacattccgcaaacgattgtttatgcatatttaatcagttttttcgattaaaaggctatttttcaaagaataatacgtacttttgcagccgtaattaagataaagagattataacataatatgactaaagaactacttacccccgattacatcttcgaagcgagttgggaagtgtgtaataaagtaggcggtatctatacagttttgtctacaagggcaaatactttacagactaaatttcgcgatagattattctttatagggccggatttctggcagggaaaagagaaccctttgttcattgagtctgataacctttgtgcagcgtggaaaaaacatgcagcgttgaaagacaatctttccgtccgcgtaggtcgctggaacattccgggagaacctattgttatattggttgatttccaaccgttctttgcagaaaaaaatgagatttatacagaaatgtggaaccgctatcaggtggattcactgcatggatatggtgattatgacgaagcatccatgtttgctttcgctaccggcaaggtgatagagagcttctatcgctataatttgacggaaacggacaaagtggtgttccaggcacacgagtggatgaccggcatggccgccctctatcttcagtctgccgttcccgagatagggactatcttcaccacccatgccacgtccatcggccgctccatagctggcaacaacaagccgctttacgattatcttttcgcctacaacggcgaccagatggcggaggagctgaacatgcagtccaaacattccattgaaaagcagacggcccactatgtggactgtttcaccactgtgagcgaaatcacaaacaacgaatgcagggaattgcttgacaagcctgcggatgttgtgctgatgaacggttttgaagatgattttgtaccgaaaggcgccacctttaccggcaagcgcaaacgtgcccgttccaccatgctgcgtgtggcaaactgcctactgggtgaggacttgggcgacgatacgctgattatcggtaccagcggacgctatgagttcaaaaataagggtatcgatgtgttcctggaatcattgaaccggctgaaccgcgataaagatttaaagaagaaagtattggcgtttgtcaacgtgcccagctgggtgggagacccccgcgaggacttgcagaagcgcttgaagagcaaagataagttcaccgaaccgttgcagtgtcctttcatcacccactggctgcacaatatgacgcacgaccaggtgctggatatgctgaaatacctcggtatgggcaatcgtcccgaagataaggtgaaagtaatttttgtaccttgctatcaggatggtcacgatggcatcctcaacaagcattattatgacttgattttaggcgaggacctcagtgtctatccgtcctattatgaaccgtggggatataccccgctggagagcgtggctttccgggtgcctaccatcaccaccgaccttgccggtttcggactttgggtgaacagcctgaaaaaccagcatggcataaacgacggagtggaagtgctgcaccgttcggactataactattccgaagtggcagacggcatcaaggacaccgtagccttgttctctaccaagacggaagccgaaatcaaggaaatacgcaagcgtgcaggccaggtggcagagcaggctttgtggaagcactttatacaatattattacgaggcttacgacattgcactgcgcaatgccatgaagcgtcaactaaaataaaagaattattaatcaattagttatcatacaatgaagattaaagttagtaatgtaaacactcctaactggaaagatgtgaatgtgaaatcgcacattcccgccgaactggagaaactgtctgaactggcacataacatctggtgggcatggaattatgaagccaccgaactgttcagagaccttgaccctgctctctggaaagaagtgggacagaaccccgtacttctgctggaacgtatgagttatgctaaactcgaggcactcgcaaatgacaaagttattctgcgcagaatggatgacgtatactccaagttccgcacatacatggatgtgaagcctgacagcaagcgtccgtccgtggcttatttcagtatggagtatggtttgagccatgtacttaagatatattccggcggtctgggtgtacttgccggtgactacctgaaagaagcttccgatagcaacgccgacttgtgtgcaatcggtttcctgtaccgctacggttactttacacaaacattgtctatggacggccagcagattgccaattacgaggcacagaactttggccagttgcccatcgaccgtgtattggatgagaagggcgagcagatggtagtggatgttccttatctggactactacgtgcatgcttatgtgtggagagtgaacgttggacgtatctctctctatctacttgatactgacaatgaaatgaacagcgagttcgaccgttccatcactcaccagctgtatggcggtgactgggaaaaccgcttgaagcaggaaatcctgctcggtatcggtggtattctgacgctgaagaagctgggcatcaagaaagatatctatcactgcaacgaaggacatgctgctttaatcaacgtacagcgcatctgtgactacgtggccgaaggtctgacttacgaccaggctatcgagctggtacgtgcttcttctctctatactgtacatactccggttcctgccggtcacgactacttcgacgaaggccttttcggcaagtacatgggcggctatccttcaagaatgggtatcagctgggacgacctgatggacctcggacgtaacaatccgggcgacaagggtgaacgtttctgtatgtctgtattcgcttgcaacacttctcaggaggtgaacggtgtgagctggctgcacggaaaggtttcccaggagatgttcgcttccatctggaagggttacttccccgaagaaagccatgtgggctacgttaccaacggtgtacacttccccacttggagcgctacggagtggaaacatctctatgctgcgcattttgatgagaacttcctctacgaccagtccaaccccaagatttgggaggctatctataacgtgtccgacgaagaaatctggaagacgcgcatggtgatgaagaacaaactgattgactatgttcgcaagcaataccgtgaaacttggttgaagaaccagggtgacccttcacgcatcgtttccctgctggacaaaatcaatccgaacgctctgctgataggtttcggacgccgtttcgctacctacaagcgtgcacacttgctgttcaccgacctcgaccgtctggccaagattgtgaacaaccccgactatccggtacagttcctctttaccggtaaggctcacccgcacgatggtgccggccagggcttgattaagagaatcattgagatttcccgtcgtccggagttcctgggcaagattatcttcctggaaaattatgacatgcagttggcacgtcgcctcgtttcaggtgtggatatctggctgaacactccgacacgtccgctcgaagcatccggtacttccggcgaaaaggcgttgatgaacggtgttgtaaacttctccgtactcgacggctggtggttggaaggctatcgtgaaggtgccggttgggcattgaccgaaaagcgtacttaccagaaccaggaacatcaggaccagctcgatgccgctactatctacagcattcttgagcaagaaattctgccgttgttctatgcacgcaacaagaagggatattctgaaggttgggtgaagactatcaagaactccatcgcacagattgctccccactatacaatgaagcgtcagctggatgactattacgacaagttctacatcaaggaggccaaacgtttcaagatgctggctgccgacggttgtgccaaggctaaggaaatagctgcttggaaggaagaagttgccgagaagtgggacagcattgaagtggtgtcttgcgaaaagaccgaagacctggtgaaaggctccatcgagagcggtaaggaatacaccattacttacgttatcgacgagaagggcttgaacgatgccatcggtctggaactggtgactacttatacggctcaggatggcaaacagcatgtttactccgtagaaccgttcaatgtagtgaagaaagaaggtaacctttatactttccaagctaagcacaagatggaaaatgcgggtagcttcaaggtttcttaccgtatgttcccgaagaatgcagacctgcctcaccgtcaggacttctgctacgttcgctggttcgtataagagcataaaaaaaagataatgtgcctgcggatatggcggaacacattatctgttcagataaaagatatcatctgcatgatgcaggcagaccatccgtttactttaaacggatggtctgtttcttttctagagcttgctttttatttcggctatccaggcgtcaatgcgttcggcggttttgttactttcgttcacttcgtcgaggggaagtcctacgaatgcaccgtctaccacggcgatggaagaggagaaggaatacccgtccgtgctgactttgttgcccaagaaggtacacccgctatccttcaggtcctcgtagagtactccgatgccgtcgcagaatgtgtcgcagtaggagtcggagtcgccgcaaccgaataaggctacgaacttcatggaaaggtcggcgctcttcagtacctttacgccgtcataccagtcgtcctgcagttcgccgtctccccaagtggaggtacctagaaccagcacttcatattccttgattttatcggcggtcatcttgtcaacactatgtacgtcggtggaggaaactcccaacttttcggctatctggttagccaactcttcgcaggttccggtactggaaccataaaaaacaccagtctttttcattgtaaataaagtgattaaattgtttgctgcaaagtaaaggctttgccggagaacgtgaaatacctacatgtagggcttttagtgttgtgccgctccccatttcgggttagcttgtggcgtggtttatagaggtcgcggctacctactaattgggatggcagactctctttttgatgaaaagtaggtattgccggattgttaaaaatgaaggacatttgtaccggtaataatagacaagtgtttatggttagattcgtacattccactcattcgcaattccatccttccgtggctggtaagtggctggtgtgggggactttgatgatgcttcttgcgggggtggctatcattgttttttcggtattctcgcatgatgcactcgatgcgtgctgtaattgcataatctgtactttcaaccgtgtcccgaaggaaggggaatatttgtataaccgctacctgccggtcatcagcatggtgtgggtggcgtttctgatacttttggtatatgtggtccgctattgcatgaacaagaggaggtagccgggtgttctataggtaaaactgaaaggagactatatgaaaaagattgttttgcttcgccacggcgagagtgcatggaataaggaaaaccgcttcacggggtggacggatgttgatttgacagagaaaggcgttgctgaagctgtaagggcgggtgagctgctggcagaaaagggattccgcttcaagaaggcgtatacttcctatctgaagcgtgccgtgaagacactggattgtgtgctggaccgcctcgaccaggactggattccggtggagaaatcgtggaggttgaatgagaaacactacggccagttgcaagggctgaacaaggcagagacggctgccaagtacggtgacgagcaggtgttggtatggcgccggagctttgatgtggctccgcatgcattggccgaggatgacccgcgtaatccgcgttttgaggaccgttatcaagaagtgcccgatgccgaactgccccgtacggagtcgttgaaagatacgattgagcgtatcatgccttactggaaatgtgtcatcttcccgaatctgaagacggccgacgaattgctggtagtggctcatggcaatagcctgcggggtattatcaagcatctgaagcatatttcggacgatgaaattgtgcatctgaacctgcctacggcggtgccctacgtctttgagtttgacgatgagctgaacttgacgaaagactatttcttgggtgatcccgaggagataaagaaattgatggaggctgtggccaatcagggaaagaagaaatgattttggcgcgcggaagcgcgctatttctttatcctctcattccatggagcagcgtcatgctgagcagtaccccgaccactatacagatgaggataaggaaccagttcatgagccgtgcacccagcttggtttccttgtgcaagttctgttcaaagtagttcttgaagaacagatagatggcaggcacggtggcgcttgccagtagcaggtcttcgggaatcttgtagatgtagactttggaaaaggcgatgagcgcccagtggcaaaggaacagaatgacgagcaggttgaccctgcgcgagaaagccagcagcagcccgatggtgaaaactgctaccgagcagggcatcacggtggtggtcatcatgggaaattccattccgcgtgcccacgaaaggagcgggtagaggaaaggcattgcatagagtacccccaccagtaccttgtatttcgggttgcgctcgaacggagtgtagccggtaaacaaatcccatagccacaacactgcaatcactccccagaagatggcgagtatatggtggtgtccgcgcgctccgcaatacatcatgtagtacacgatggatatccacccgttcagaaataccatgtagattttcatggagcgttttgcccataaggtcggtttccggtagagttgcgtggtgagcaggatacctgctgcggtgatgaggagctgtgtccaccaggtggcctcgttgtattgtgcgatagtattccagaatatttccatttgtgtccattaaaaaaacggctgcaaaggtagagttttctgccgaaagaatgaaatcgttttctacattttgcctatctttgtgcctccaaaaaataggtaaaaagattcatggataagactttgactgaacaagagattgccctgctgcgcaggaaactcgatttattgcttcgtaccggacagctgctggtggagagtgcggctgatacgaaccgtgttgttcgtaacctgaaccgtgttgccgcctatctggggctgccggaagaaaagctccacatcgacgtaagttataccatgctggtggtgaatgtgagcgacggcctgcattcgttctccaaattccagaaatgtgaaaagcatggcatcaacatgactgccatttccgaaatcagcaaactgtcctggcgggctattgagaatgactattccctcgaccagtatgaggaggaactggaaagaatcaaaaacaagaagcggaactatgtgccatacgttgttgccatcggtgccggctttgcctgcggaggtttctgtaaactgttcggtggtgactggatggcgtttctgtttacctctatctgcgcttttgccggcttccgcgtccgtgcccgttgcatggagttcggcatcaatcactatatgagtattgccattgccgcattgatttctacctgtctggcctatgtgtcttcgtttgccgggctctcggaaactccctatcatccgttgttggcgtgtgcactgttcatcgttccgggggtgccgctgataaactttgtggatgatatgattgacaattatatccaggtgggcattgtgcgggctgtgaatacggtgctgatggtctgtgcaatggccttcggcattgtaatagccatgcgcctgctgacggtggaggatgtcgtgattgacaagaagttcagcgaattgagtatggtgcctcatgacagttatctggtgtatgccattgcggcggcgatagctgccatgggattttccatgatattcaacatacagcggcgcttgttgtgggttgttgcggtgggcggtatcattgccgtttgtacgcgtaactttgtcaatttcgaattgggttacggaccggtgataggttcgttcatgggcagcatggttgtcagcctgatagccgtgaaggcagtgcattggttccatgttcccaatcatgtgctgacgattccttctgtcatcccgatgattccgggagtgctgatgtatcgtgcacttttcgggcttatcaatatgcacggtgtggtaggcgaggtgacggcggttgtttccaacggcatcacggcttcactgattattctctgcatagcgctgggagtggcggtgcccaatatctttgcccgccggtatattgccaaggataggcagcgctttcttcaggaggagctgcagaagcgcagggaaagagggaaatttatagaatggtgatataggtggagggtgtcaaaaaactcttaacactttcttttaggcgcggattacgcggatttcacggattttgtttattgaatccgtgttattccgtgtaattcgcgtctgatattataacattataaaagtgctcatatatttttgaaaacttctcttcttttttaaatgccctttttcggattatagtggtaaatgacggtttcgcctttttgcagggatgtttgtacgtcaatcagacgctggttgcggcttccccggaaatagagttcctcatccctcagttctttcttgaatttgccgtccaccagtacgtcgatgtacttcagcagttgggcttggcgcgggttgcgcagtagtttttcgaaagtatagcccgtatagcaccagatgtttttccggctccgctccttgatggcatgtgccagttgggtgaatccttccggctggaacatcgggtctccaccactgaaggtgacgtctgcaaagttgtcggcaaggactttttccagaatctcttccgtactcatccagtgcccgcggttgatgtcccacgactccggattgtggcaaccgggacaaccgttggggcatccggcagcataaatggcggtccggaagcccggaccgtctactgtggtatcttctaaaatgtcgagaatagaaagcatgagtagggaatttttaattatgaacgaccctgtcgttcaactctgccagcttggcattgttccagcggtcggttgtccccaccaggtagccggtgatgcgttgcagcttgtcgatatgcttgctgccgcacttcgggcattcttccaggtttggggtggagttttcgtggccgcactccagacagcggttacggttgtggtttaccgaaccgtagccgatgttgtattggtccatcatgtccactacacgcataatgacttccggattgtgggtggcgtcaccgtctatctccacatagaagatgtgtccgccgcgggtcagttcatgataaggagcctccacttccgctttgtggcgggcgctgcatttgtagtatacgggcacgtggttggagttggtgtagtagtcacggtctgtgatgcccggcagcgtgccgaactttttacggtcgatgcgggtgaacttgcccgacagcccttcggcaggagtggcaagcacgctgtagttgtgctggtattgctccgagaactggttggcacggtcgcgcatgtaggtcacgattttcagtcccagctcctgggcttcgccagattcgccgtgatgttttccgagcaatgccacgagacattctgccaacccgatgaaaccgattcccagtgttccctggttgatgacggaagcaatcgtatcgttcggtttcagcttctcgctgcctatccacaaggcagacatcagtagcgggaactgcttggcgaaggcggtcttttgaaactccatgcgctcgtgcagctggcgtgcggtcacttcgagcatactatccagcttggcaaagaaccgggcgatgcgctgttccttgtcttcgatgttcatgcactcaatgcccagacggacgatgttgatggtagagaaagagatgttgccgcgtccgatggaggtcttcggtccgaaacggttttcgaatacacgggtgcggcatcccatggtggcaacttcatgctggtagcgtttcgggtcatcggctttccagtcctcgctttggttgaaggtggcgtccaggttcaggaagttcgggaagaaacgccgtgccgtcaccttgcaggccagttggtagaggtcgtagttgcggtcttcaggcaggtagctcacaccccgtttctttttccatatctggatggggaagatggcggtttctccgtttcctaccccttgataggtgcttttcagcagctcgcggatgatgcagcgcccctcggcagaggtgtctgtgccgtagttgatggagctgaacaccacttggttgccgccgcgtgagtggatggtgttcatgttatggataaacgcctccatggactggtgcacgcgcgatacggtcttgttgacagcatgctgcacgatgcggtcctcgtccgtcagtccgtccaacggctgcagcagatagtcggccagttccttctgatagagatgggaatagtcttttccattcagttcttccaggttcttgacttcctcgatgaagctgttgcgcacgtagggggcaaggtagaaatcgaatgcagggatggcttgtccgccgtgcatctcgttctgggctgtttccagcgagatgcatcccaggatactggcagtctcgatgcgtttggccgggcgcgattcgccgtgtccggcagagaagccgtatttcagaatatggtccagcggatgttgcacgcatgtcaggctcttggtgggataataatccttgtcatggatgtgcagatagttctgggtgacggcatccagaacttcttcactcagcagatagtcgtccacaaaaggcttggtggtttcgctggcaaacttcatcatcatgcccgccggggtatcggcattcatgttggcattttcgcgtgtgatgtcgttggacttgatgttaatgatttccaggaacatgtcgcgcgtctttgctttgcgggcaatgcttcgctggttgcggtaagcgatgtatttctgggcaacgtccttgcggctgctcttcatcagctccacttccaccaaatcctggatggcttccaccgtcatctgcgaatctcccttgaaagagatgcggtccgtaatctggtgtatcagttgcaggtcttcccccttgtctgtatgcaacatggctttgcggatggccgttgctattttttcttcgttgaatccgacgacgcgcccgtcgcgcttgagtactgtctgtatcataaccttttatgcttaaatgtgactgtcttttttagtttaattgcggaaacaaagatattatagttattgataggttttgctttttggaaaactttttgtggtttaaaaagtgttaatctattgattattaatgatgtaattgtttaaagtggaaaacttctaatgaaaaataacttttaaagttattcattactgattattattgcatgcataagcatcatctgatttcgaagtgtcaaatgaagataaatcttttgggcagattgtgaatcttcgatttttttagttatatttgcaacgaattggtttatttaaggtttttagtccttgataatacttcttgttgccattcgattgtattgctttgctgctcatggtattggggcaaaagtatcattattataataatcaaagaaaggatgaacatggcaaatgtatttcctccgtttaaaattgatatagctggggctttttgtgtacctcgtgcattgaaggatgtccgcgagcaatatcagaacgggcaggtgagccggcagatattgcaggctgttgaagatgcggaagtgcgcagtctggtggaacggctggagctgggaggcatgaaggttgtttccgatggtggtttccgaagtcgcgattttttggaaagctgggagggtatttgttccaaagacggccggcctttctccgaaggctctcctttggagattacaggacggctcagtttgctacggcatcctattctggaagaattcgcatttcttgattccattgtggacggaggggtgatgaaaaaacagcatatcccttcgccggcagaggttatgacccagattattcaacgtgtggagcggactcagatagaaaccgtttactccgacatccggcttttgacggatgatattgcttcctgctacaaatttttgcttaccaaactttatgatgcaggctgccgctacgtccagttcgacggggtacattcggtgataatggaagataccatccggctcaacaaccgggttttgcgtgagcgtcctgcagggatgtatgttgcattccatgcaccgacggacatgctggtgcaactgcatggggccgatgcttatttcctgaattacgactgtggcgcgtgcgaccgtaaccgtctgctctggttcatacacgagaaggaagcggtgttcggtttcgtgctgtcccattatcctcaggaggacgagttggatgaattgcaggcaaaaaccgaaagtgtattgaactatattcctttgaaacgtttcactttatgtctgccggatgccaatgcgcttctttcgccttcggaggccgatgaggagaaacagtgggaaaccgtaaggttggggatggaaatggctgcgcgtatcttctcttgaaaaacgccgcattccatcattccgaatgccacacttcagcaagggaaatgccacacttcacagaggcaaatgccattgattgggcctcgtgaagtgtggcatttcgattgacgaagtgtggcactccttttttagtctccggtgtgtccggttttattatttgacagcttcggctatcttttcctgaagctcgtcaccgtgcagtccgcgtgcaaggatagttccttcaccgtcaatcaacacagtgtgggggatgctgcttacggcataaagctgtgcgccttcgcagttccagtatttcaggtcggacatttgcggccacgtgatgttcagcttcttgatggcttctttccatgcgtcggcactctggtccagagatacgcctacaatctcgaagttcttgttcttatatttggcgtaagcttccaccaggttgggcatctcgcgacggcaggggccgcaccagcttgcccagaagtcaacaaggacaactttgcccttgcctacgtagtcggacagttttaccgtttttccttccggcgtctgcatctcgaagtctgtaaacttctggcctacggcagtggctttcatcttttcaacgttgttctttatcttgacgatggcttcgtcgttgtcgtaagctgcagggatttggggcatcagcgggtcgaggtctgccacatccatgtagtagtagttctgcttcagcaggagtacacccaccgggttggtgatgttcttgttgatgccggctttgatggcggatatcatgctgttttccagattttccatctctttgcctttagcctcgcgttgttcgtcggtcagtgtggtgtccgacatggattcgtagatgctcatcatttgtttgttcagaccgttgatttgggctctgatttcctggtaggcatcattgttggcagtaccggtggcagagttgttttcctgcgacaagttgattttaatcttgccgttttccaggaagaagtcgatggctgcgccgtcttttccttcggctttgtaggagatgtagcggttgacagcagtatcttgtgtacccttgaaggtaaatgttccatctttgatgacagcagagtccaattttacgaattggcgtccttccacggtttccagatatacggtgtcgccgtcggctgcaccctctacagttccggttacggtgtaaccgttgtttccactgttacaagctgtaaatacagcggctacagcgagcagataagtaaactttttcattgtttgtttttttaatgaatgattatagctgcaaatatagtaataaaaaatcccctccgatatgaaccggagaggatttttatagttttaatcccatttttagcgataacgctgtgcttactattattcggcagcagcttcttcagcagcaggggcttcttcggcaggagcctcttcggccggtgcttcggcagcggcttttgcagcagcttcagcagctttcttttcagccagtgcttttgctttttcttcgtttatcttcttttcagcttccagacgtgcttttgcttcagctttcttagcttcgtcttccttagccttcagagcagccaaaccgctttgtttgttgttcttccaggcttcgaacttagcatcagcttcagcttcgccgaatgcgcctttcgctacaccgcccagcaagtgcttcttcatgtaaacaccttcgcgagagaggatgttacgaactgtgtcagtaggttgtgcacccttcaacacccagtcaagtgcgcggtcgaacttcaaatctactgtggcaggattggtgttaggattgtaagtaccaatcttctcaataaatttaccatcacgtggtgctcttacgtctgcaataacgatagagtagaaagcgtagctcttacgtccatgtctttgcaatctgatttttgttgccatttaattaaaatgtttttagttaatgatttgaattatgctactatctcgtaatagcgagtgcaaaggtaagaaaagattttgagttttgagttatgagttatgagttatttgttggcacgaggggtgtttttttttaaatgttcacacaacgtcacccataactcatcacttgtcactcatccttctcccgagtatttcctggggtatctcagcagaatggcgagtatggcgcatgttcccatgcagaaggggtaatacaggtttccgatgatgctgatgggtgaaatgccggcaagtccggaggctatcagcatttgcgctccgtaggggatgattccttgcacgaggcatgagaaggtgtccagtatgctggctgttttccggcggtccaggtggaagcggagggcgatgtccttggctatggggccggtggtgatgatggcaatggtgttgttggcggtacacagattggcgatgccgaccagggcggcgatgctgaattcggctccccgcttgccgctgacgtggcgggtcagccgggagatgatgaagtcgatgccgccgttgtagcggatggtctcgagcatgcctccggccagcagggtgatgatgatgagctcgcccatgccggtgatgcccgttcccatggctccgaaccagtcgaagaaggcggtaccggtatagataccgataattccagtagagaggatgcccagcagcagtaccagcatgacgttgacacctgctacggccgtgcccagcacgatgaggtaggggattacctttatccactcgatggtctgcacttggggcggggcggagacggacagtccttgaaagatgtagatgcccagcacgacaagcgctgcggggactacaatcatgaagttgacgcggaacttgtccctcatcacgcagtcctgcgtcttggtcgatgcaatggtggtgtcggatatgaaggaaagattgtctccgaagaacgagcctcccaccacgatggcgaccatgtagggcaggtcgatgcccgtcttttccgccagtcccacggctacgggagtcagtgcgacgatagttcctacgcttgttcctattgagagggagatgaagcaggcggcaatgaagatgcccgccagcagcaggttgtccggcagtatatgtaaggtcagatttacggtcgcatcaatggcgcccatctgcttggcgctttgggcgaatgctcctgcaaggatgaatatccataccatcagcatgatgttcttgttgctggcgcctacggaaaactgatagatgcgctgttccagattcaggccgcgcgtgatggcgatggcatagcaggatgaggcgaggaaggctaccgtgatggggactttatagaagtcgttcaccaggagcgaagtcactagatagaggcaaaggaacaccgccaacgggctgagtgcccaccagccgcctttgggtttggagattgtatcggttgttgctgacataatttacgatttacgattggggatttacgatttgacgatttacgattgatataactcttgaaatcgtagaatggttgttgtacaatacaaacttcaatcgtacatcgtaaatcgtcaaatcgtaaatatataagccaattttgctgcaaaggtataaaaaacaaagggcgggacaaaatggttttgtcccgccctccatatatcagcctttaattttcacctttcacctttcaattttcaccttacaaagttactccggtcttgaagatggctatttccttgtagcctttcttttcgttgttcacgaattcgccgcttgctactttgatgatatactcgatgaagcgttcgcaggttttctccatcggttcgttctcgacgataactccggcgttgaagtctatccagcccggcttgttctttgccaaagtggagttggtggaaatcttcatggtcggcacataggttccgaagggcgttccgcgtcctgtggtgaacagcaccatgtggcatccgcaagaggcaagggcagtggcggctacaaggtcgtttcccggagcagacagtaggttcagtccctttactttcaggcgttcgccatacggaagtaccccttccacgtagctcgtgccacatttctgtgtgcatcccaaggctttgtcctccaatgtcgagatgcctcccgccttatttcccggagacgggttttcacctaccggttcaccgtgtgagaggaaatattccttgaagtcattaatcagcttcaccgtgtcctcaaacagctctttggtgcggcagcggttcatcagtatggtttctgcgccgaacatttccggcacttccgtcagtacgctggtgccgccttgcgctacgaggaagtcggagaacatgcccagtagcggattggcggtgataccggagaaaccgtccgaaccgccacacttcaggcctacgcgcagttcgcttaagggaatatcctcgcgctggtcctggatggctttggcataaagttcgcgtagcagttccattccttcttcgtattcatcacccactttctgggtcaccataaactttacgcgctcctggtcatagtctcccaggaattcgcggaacacatccggctgattattctcgcaccccaagcctaccacgagtacggctcccgcattgggatgcagtaccatgtcgcggaggattttctttgtattctcgtggtcgtcgcccaactgggagcagccgtagttatggggataagccatgatggcatccacgccctttccgcccgtttcgcggcgcaggccttcggcaagctggttgatgattccgttcacgcagcccactgtcggaataatccatatctcgttgcgcacacctacgtcgccgttcttacgtttgtaccctctaaaggtcaggtttggcgcgccggtattgaggtttagagttgtagtattgaggtctacgttgacggggttgtatgtgtattccagcaacccggacaagttggtcttgatattgttttcattcatccagtccccctgcttctgcgctttccgggcgtggccgatggggtatccgtatttaatgacgttttcgccttccgcaaaatctttcagtgcaaatttgtgtccggcaggaacatcctcgttcagggtgattccctttccgtccaccgtgagtttttcaccagccgggagtgctgtgatggccactgcaacattgtcggcgggattgattttcaggtactttgtttccatcatgttatttacgatttagctatttacgatgtacgattgaagtttgctttgttttacggttgcgatagttgctttttcttgcgggcatggcattttcaatcgtacatcgtaaatcgtccaatcgtacatcgtaaatcgtccaatcgtacatccttattatttattgtaataaaactctatattctccttcgtcagcaagtcaatcggcatgaagttctcccttgtgatttcctttttcagaatcaggtattcgcacaaggccttgatgccgtcgaatccttgcagggtgggctgctgtgctatgaggaagaagatgcttccctgcttcaggcagtctacgttgcgttgcagcaggtcatagcccatcaggttgaagtcttttttctgcttcttcagcaggtattccccgatgatgtatgctttggagttgaaggtgattccgttctttacggtaggatgctcttggaagaactcgtccagcatcagtgtgtcctcgctgtcgcgcttggcatgcaggtccagttcccagatgcggcaggcgggatgatgctcctgcatgtattcgcggaaacctatttcgcggcgttcctgctggttcgaccccacgatgccttcatttatcttgcggaagatgacgatttcctgcgcgtcttctccggcaagcagcatcagcatgcgggcggcaaaatatccgctctggtgcgagttctgcccgtagaaggagagggcgggctcttcctttatgttggagtctatatatatataaggtatattatgttgcgtcagctcatccgtgaagggcttggtgtattgcggaacggtgggggcaaacatcactccgtccggctccagtgccagaatctgtccggaggcttccgcgaatgaatgatagtcatacgggtcatagtaggagaggtgcacggcgacgttgaagtcagagtaagtctctacggcgttgtgtatgcccgtctccacgtctgtccagtattcgcctttctcgtgcagtggcagcaggcaggcaaatgcgtacttcttgttcgaagccagtgcgctggcatacatattgggctggtaatccagttgtttcaggatttcttccacccgcttccggctggactcggacacaccgctacgcccgtgaatcacacggtcgacggttcccacggatacatcggccatcttggcgatatcctttattctgactctttccatctgtatatttacgatttaacgatttacgatgtacgattgatgttgctttggctacgattctacaatgtaatctcaatcgtctaatcgtaaatcgtcccatcgtacatcttcttgtgctcgcacacaattataatcttaatattttcgatacaaatatatgataattttttgtatttcaaaaattgttgtatctttgtgcccgtacacgaagactatgaagaacgaatgttattttgatttactctccatagtttcaggtgtttaagttctgtttatacctcgaaatgataaattgaaaggaaacaaattaatttcatattaaaataaaacatagaaagattatgggaaagaaagtagttacattaggtgaaatcatgctgaggctgtctactccgggaaacacccgttttgtgcagtccgactcttttgatgtggtatatggcggcggcgaggccaacgtggctgtcagctgtgccaactacggacatgatgcttattttgtaaccaagttgccgaaacatgaaataggccagtcggctgtcaacgcattgcgcaagtatggcgtaaagacggatttcattgcgcgtggtggtgaccgtgtaggtatctactatcttgagaccggtgcttccatgcgtcccagtaaggtaatctatgaccgtgcacactccgccattgccgaggcagatgcggcggactttgatttcgatgccatcatggaaggtgcagactggttccactggtcaggtatcactcccgccatctccgacaaggccgccgagttgacccgcctggcttgcgaggctgccaaacgtcacggcgttacggtgtcggtagacctcaatttccgtaaaaaactctggaccaaagaaaaagcccagtccatcatgaagcctttgatgcagtatgtggatgtctgcatcggcaacgaagaggatgctgaactctgtctgggcttcaagcccgatgcagacgtggaaggcggcaagacggacgctgaaggctacaagggaatcttcaaggcgatggcgaaggaattcggcttcaaatacgtaatctctacgttgcgcgagtctttctccgctacccacaacggctggaaagcaatgatttacaacggcgaggaattctacgagtcaaagcgttacgacatcaatcctatcgtcgaccgcgtaggtggcggcgactctttctcaggtggtatcatccacggcctgctgacaaaacccaaccagggtgccgccctcgaatttgcagtagccgcttccgccttgaagcacactatcaacggtgacttcaaccttgtttctaccgaagaggtagaagcgctggcaggaggggatgcaagcggacgagtacaacgctaagctcatttacgatttgacgatttacgatgtacgattgaaattacttctacagtgaactcggaggaattgaaaatacgattgaagatgttcgctttgagaataatcaagatggtagattgtatgcctaatcggatttcgtcaatggctatagctaaacaaatagtacgttcagggacttcacctgctgccaattatagggcagcttgtttgggaaagtctgataaggattttctgaataaactgaaaatggtagaggaagaactggatgaaactatacactggttggaaattattgctgaaagtgagatgattcctgctaataaactgcttgggttgcaacaagaggcgcatgaattgtataaaataatagtgagttctattgtcactacaagaaatcggttagcaaaggaagtttgaatcgtcaaatcgtaaataaaaagaatagatataaagtaaagtaatattaatcgtaaatcgtaaatcgtcaaatcgtaaataaaaagatgagtaaatttgataaaatctcagtattgaataagattggttctaccggcatggtgcccgtcttttatcataaggatgcagaagttgcaaagaaagttgtaaaggcttgttacgatggaggtgttcgtgcgttcgagttcacgaaccgtggtgactttgcccacgaggtgtttgcggaagttgtgaagtttgcggcaaaagagtgcccggagatggctatgggtgtaggttccatcgttgaccctgctactgcggcgctgtacttgcagttgggtgcatgcttcgttgtaggcccgttgttcaaccctgagattgccaagatttgtaaccgtcgcctggtagcctatactccgggatgcggaagcgtttcagaagtgggcttcgcgcaagaagtagggtgcgacctctgcaagatattcccgggcgacgtgcttggtgccaaactcgtgaaaggtctgctggctccgatgccctggtccaagctgatggtgaccggtggagtggagccgacccaggaaaacctgacctcctggattaaggcgggtgtgttctgcgtaggtatgggctccaaactcttcccgaaggataaggtcgctgccgaagactggacttacgttacagaaaaatgtaaagaagctttggggtatattgccgaagcaagaaaataaataagaaattcattttgtttaaaggtgtttaaaggggacagccatcgaagcgtttcggcgcttcggtggtttgttttttactggaaagtatactcccgatgaacaatgaaatgtttataagtgtaaactgtacccttaaactctaaaacaatgttataaaacgcgcgaaaaatatgccggcgttttgtgcgtgcggataaaacacttacctttgcagtgcagttgggaaactgcatttggatttgataaataataaaaacagttttcaataaaggatattagttgttaggtaaaaggattgaaaatagatttttttcataagctaaatgttttgaataaataggtaaattaggtaaaggtaaaaattggattttgaagttttcagaataggtaattgaagttttatttttcaggtaaagagaaagattgatttttaggtaacattgacgcagtttaaaagaaaagcctttaaggcttttcttacaggggcgaggggttcgtgagagcttgctcgtttttttattcctatattcttcgcattttttgtatattttgtccggactctacttcttttttgtatctttgtgtcggatacccattaaaaacaagcagcaactctaaagcttaaatagctctgaatttggaacatatattgaatatattcgattggcttttatacatatggtttgcaataaacatactgtatctattggtttacagtctggcgtcacgccggcgtgacctgcctctgccccctccagccaaggaacacaagcgttttgccatactgattcctgcctaccgcgaagatgccgtgatacacgagtgcgtccattcatgtctggagcaggattatcccgccgactgttttgatacggttgtcatttcagaccgtatgcagcccgaaaccaacgcttccctcgctgtgcttcctgtccgcctggttgaagtgcattttgagaaaagcaccaagtccaaatctctgaatgccgccatggctgccatcggcaatgactatgacatcgctttggtgctcgatgcggacaatgtcatcccttacgattatctgagtgatattaacgacctcttcgccaatccggaagtcgagattgtgcagacccaccggagtgccaagaacctgaacaatgacatggccctgctcgatgccatcagtgaggaaatcaacaataccattttccgtctggggcatgccaagctgggcttgtcggctgcccttatcggttccggtatggcgttccgttatgacttgtttcgtgatacgatggcggatatcaaggctgtgggcggtttcgaccgtgaattggagctgaccctgctctatcgcggcaagcgtttttattatctgcccgaaacctttgtgttcgatgagaagatacagaacaccggtgatttctcccgtcagcgccgccgctggctgtcggcacaatggcactactgccagacctttgccaaattcctatggaaagcacttgctgcacgcaactgggacttctgcgataagcttttccagcagctttccattccccgtctgctgctgatgggtttcacgttctttttttccgtactatttacgatttatcgctggacgtggggactgaagtggtggctgcttctggttctgcttgctgtggcattgctcgttgccgttcccaaaagattctgtaccagccgcctggcaatggccctgcaaaagataccttacactttcctgctgatggcgggaaatatctttaagctgcggggggcaaacaagagctttatacatacaaagcatggggtggtcgaaaaatagaagaggtgcatttacgtgaaacaaataagtctataagcaaacaaatgatatacggaaaaatcactttagaagattggcgtacagcctgcgtagagggggaagagccggaatcttcttttgagagttataatctgaggcttttctttttcggaactttgtataatcgggacaccttgcaggtaaccccagatgataccaatgccaagcttgctgatttggagaccaccatcaaccgggttattctattcaaagcctcccgcatggcgcggatgttcggcaataatctggtgtttccttttatggatatggaacttttccgtttcctgcaggagttaccagtcagcctgaagtgcaagggggacagtgtgctcgacatagcacgcggtcgttccgtttccaagtatttgctgaaatatcattataaacctttgcttcccgaagccattacgtcgaaaaagaagcagggcggttttgcacccatgccgttgttcttccgcgacaaggcacggcgtgcccgcttcaaggaatttatcctttcttccggcattatgggcgattatctgcgccgggatgcggtggagaagtttcttgcagattatgaacaagttgcagatcaggcaggaggttggttctggtataggcagaacaaggctttgcaatacttcaatctgttgacgcttgttgtgtggtgggaagagtttgtggaggaacgggaggtgaaattctgaaaaatacgtttagtattgtacccacaataattatattttctatctttgtaagaaaagcatggaaatggaagattttagtaatcaagatactcatatttatgatgatgaaataatcattcgggtattgaatgatatttttgaacgttacttcttccttcttcaggacttttacgtttcttttaaagcaaagacagatgaatagagtcttatggcagcaatatggattgagtgaaataaatgggaaacgtattatggacgttttttcccgtttttcagaggtgcaagaagctgtattgtttggttcccgtgccaagggcaattataggcagggctcggatattgatattgcagtaaagggaacggtttctaaagatgtcttgtcagcgcttcttgttgctttcgatgaaacggtattgccttattttgttgatatagtggtttatgaccatatcaagaatatagcattgaaagaacatatcgatagggtgggaatttgtatttattcggcattatgaaagtatctgtcatcattcccgtttacaatgttgccaagtatatagagcgatgtttgttgtctgttctgaaccagacttggcaggatttggaagtaattttggtgaatgattgcactccggacggctctatgcagatagtaaaaaaacttatatcatcgcatccgcgcggagcagtggtgaggtgcctggagcatgaaaagaacaagggactttctgctgcaagaaacaccggtatttcagtgtctgtgggcgattatctgtacttcttggatagcgatgattatattcctgcgaatgcaatagagcttttggcagaggcagcgaggcagaagcaaacgaattttgtgataggcaattatgaggtgaccggcgccagacgttgggctcctcctttatcattaggtaccgggctttatgaagggaatgctcttgtactttccaattatgtgcaggaaaaatggtatgtcatggcatggaacaaactggtgagtcgtcctttcgttttgcagcatcaactctattttcaggagggcatcgtacacgaagatgatttatggtcattcaagctggcatgtatggctcaaagtatgtatgttgttgatgagaccacttactattattctatgcagccggattccatcatgcgggcgccgtctatgcgtaatttggaatgtcgtgtgctggtgcttggatatatctatgattttatccggtcttcccggtgcttgcaggataaccggcagatatacatattctttgaaaacttgaaggctaaatattttgaccgtattctgtatttcacgaaagataaatctttttattatcaaagttatttggtctttcggagcaaaaagtatgcatctttgtttaaaatggtggggttacggcccgtatggaagctgatgttgcagaacatccattatgcgcttcctacatatgccggctatttgtattttaaggcttttgtgaagtcagcctattatttgctggtgatttctataaaaatgaaggctgtgttgcgtgtaaaatgagcgaatatgagtaatgtcccggaaatatccattatagtacccgtctataaagtagaagaatatttgtcacagtgtattgacagtattctcgtacagacatttacaaactttgaattgttgctggtagacgacggaagtcctgaccgttgtggggaaatgtgcgaagagtatgctcaaaaggatgagagaataagagtcttccatcaagaaaatgcgggggtcagtactgcacgaaataaaggattggctgaggcatatggaaaatatattgtttttgtagattcggatgattatatcttacctgcatatctggaagatctatataatgaattgtctgaacataaaggaagtggggttgtaatagaatcagtcataaaactatatcctaatggagttatgcaaccatctgttttcccgaatttagatttttcttcagaggacagatttcgcgtgttgacagacttagtagataagaatataggttatcctcatagtaagatatatagtagagatattataaaaaagtatagtctttcatttttgtcatcaatatctttgctggaagattttttctttttattggattatattcaatatgctgattttattttgatacgtaatatttccaataaacaaacaggcatattaaagatgaaaataaaatccaaataaatacaactaaatatgctttatatcagttctttatagggtagttatttctttcagttgttttcactattttctgttaattggttctttttgggtacatttttgtttcttgtttgtttcttgatttcagttttaattcgtacatttgcatacgaaaaataacgaatgaaagaatacgattatgccacgaataaagaagcctaaaaaagtaaaagaaccaatccgtcttcggatgaaggatttgtccgatggcagcaaaagtctgtatctggatatataccgcaacggcaaacggacatacgagtacctgaagctgtatcttattccgggaacggacagcaatacccgtcggcaaaatgaaataacaatggctgccgcaaatgccatcaagtcgaaacgtattatcgagctgaccagtggtgaagccggtatcgtgaaccatacggataagatttatctgctggactggatgcaaacctatctggagtaccaagagaaacgcgacaagaagggcatcggtcaaatcaaagccgttacccatatcctgaaagaatatgcaggggaaagatttatattggatcgggttgacctcgctttttgccaaggctatatcgactacatgctgacaaccttccgccctaaaggaaagccgatagcagcttctacacgcaacacctattatcagatattcaatggcgccctgaatgctgccgttcgggctaaacggttgttgagaaatccgtttaacgagatggaaaagtcggagaagcccaaaatgccggaaagcgtgcggtcctatatgaccatcgaagaggtacgggcattgattgccactccgatgcaggaagggagggtaaaaaatgcctatctgttctcctgcttctgcggactgcgtatcagcgatattgtcggcctgaaatggaagaatgtctttgtcgataacggccaataccgtctggcggtagctatgcagaagaccaaagaaccgatttacctgccactctccaacgaggcgttgaaatggatgccggagcgtgaggacaaggctgcagacgatcctgtgttcaacctgccttcaaatatcaatcagtatctcagaccgtgggccgaagcggccggaatcaccaagcgttttacttttcatacggcccggcatacattcgcgaccatgatgctgacgctcggtgcggatctctataccgtatcgaagctgcttggccatacctccgtgagaatgacacaggtgtacgccaaaatcatcaaccagaaaaaagacgaagcagtcaatttggttaacggcctattcgactgatgtagtcatacatgtcaaattcaatttaaggtaaatatttccggcttttctccgatatttcaaatggtcgaagtaatgccactattataataagtataaacccataaaaaacaattcgacatgaaaggacaaaacaacaggtcctctctttttttgaagggagaccacatctgcaccacttcgctacggaacaggatgtagcggaagaattttacgagttgctctccgaagcaagggagctttatcttcaagacgtcatgacaggcggcaaacgatatggccgctacgtggatgactttataaacagccaccggtacatcgactgcaacagtgcggtttgcaggaattgccatgaaatgaacattcatatcatcagagggctgttgctcgattgtacaagtctcgtcaaaagcctctttaccgcagaaacattttctttcgaggagtgcatggccttgaaacaaaagtacgacattgccggagtatggttcgactcttcacgtatagaagattccagaaacgctccacctctctcctttggttgcaatttttcccgtgaacagatgacaggtattgtggcttgcgccaacgcttatcatctgttttgcgtttccactctccgcatcgaggacatggaagcgctttttgcctgcaaggagaatttctgtatacgtgtgaacaatatccgccatgtggcggttctgttcgatgcgttgctcgaaaacacctttatcctacctcactggcagtcggttctcgacaaggggcggttcctgttgtccaaagacggcacaagatatgttaccgcttcaagcctctcgtctgccctctctgcggcgaggaacaacattacatcggcaaacctcggcatacgaaaagccatcagtcggctgaaaatatgacacgaagtgccaaaaagccaagtatgtgaaagataaaacagtgatagttgccgtgatacgtgcatagtatcatgccggaatttccggctgtccggttcacatcacataactttgacctccgttagcgcgctgcataacggaggtaactctccattgtctaattttaacatgtattttatgcaaaacagaacaacattcatggagcggttaagcgaacggctgaccgccatagaagcggttctcaagaagttggaaccggtggaaggtctgttggagcgtgtggctttactggaaaataccatttacacgaccaagaaagtcttcacttttcaagaggcgtgcatgtatatcggcgtgtccgaaagtatgttgtacaaactcacatcgaacaaggaaatcccgcactacaaacctcgcggcaagatgctttacttcgcgaaggaagagctggacgcatggctcttgcaaaactacgaacctacggtggacgatgccatgcgtatggcgacggaagtatccgcaacccaaccgttctttaaccagaagcgctatggaaaacgaaaaaagaactgaccgtaactcgtgggcggaactggacgagaatcgcctgtcggatattctcacggcatcgcagataaaggccacggacacctacgtgactccgccccagattatatggatcgacaactccaccatagcgacgctcggcaattttagcgcttcgacgggtaaggcgaaggcgaaaaagacgtttaatgtctctgctattgtcgctgcgtcactggcgggccggcaggttttgaactaccgggcgcatctgcccgaaggcaagcgcaggatcttgtacgtggacaccgaacagagccgtttccattgccataacgtgttggaacgtattctccgcctggcgggactgcccaccacaaccgacaacgagaatctcgatttcatttgcctgcgggaatacacgccggccgtgcgtattgaggtcatcgactacgctctgcgacagaacaaagggtacgggctggtcatcattgacggcatccgcgacctgatgctcgacatcaacagcaccagcgaatcggtggaggttatcaacaagatgatggaatggtcgtcgaaatacgacctgcatatccattgtgtgctgcacctgaataaaggcgacaacaatgtgcgcgggcatatcggcacggaaatgagcaataaggcggaaacggtgctggtcatcaccaagagtgcggagaatcccgttatcagtgaagttcatgcgctgcatatccgcgagaaggagttcaaaccgtttgctttttccgttgatgacgaaggattgccggtcatggtggataactattcgtttgatggcagcgtgagaccgaaggcccggagcagcttcatggatttgtccatcgagcagcaccgggaggcgctttccgccgctttcggggacaggcccatcaaaggtttcgagaacgtactgcaggctctcatggcctcctatgaggctatcgggttcaaacggggacgcagcgtcatgataaaactgctgcagtacctgacggaaaacctgaagctgatcgtcaaacgggacaagctcttttattacgatgtgaccccgaccgaagccttgcttttcgacgaagaatgcgaggacgcagaaggtgaaaaataatttagtttactttggtccgggtatatataggagaaaaaccaaagtaaaccgttttttgaaaacaagtgaaaagaaaatgacatgaccatagcggaagcaaaacaactgcgtatcgtggactatcttgccagtctcggctaccacccccagagtgtaacatcgaaacaatactggtatttgtcgccgctacgcaatgagcgtaccccgtcgttcaaggtcaatgaccggctcaacgaatggtatgactttggcgcagcgacgggcggagaccttgtggaactgggcaaacacctttaccagacggacagcgtgagcgaagtgcttgcctatatagggaagcacgagaacgctatcccgatacaaagggtgcggattccggggacaacgccccgacccgtcgaagccgacatgaaggacgtgctcgtcgtaccgttgcagcaccatgcgctgctctcgtaccttcattcccgtggaatcgacggagacatcggccgcatgttctgccgggaggtccattatgaattgcggcaacggcgctacttcgcccttgccttcggtaacgtggcgggcgggtacgaggttcgcaatccttattataagggctgtatccggtgtaaggacatctctgtcatcaggcattctcatagtgaagcacagaaccgggtttgcgtgttcgaaggcttcatggattttctctcttacctgacgctgaaacagacgggtgatgatacggtctgcatcggcgcaccttgcgattacctcgtgatgaactcggtgaacaacctgaaaaaggctttggaacacttgcaggtgtacgaggaaatacactgttatctcgacaatgatctcgccggacagaaaacggaagagaccatcgccggcatgtacggcaagcgggtgcacaacgaagcactccgttatcacgagtacaaggacctgaacgattacctgcgcggaaagaaacggtaaggcattatcgttacccctcccttgaaagctctcctcccggagggctttttttatgcccgtttttcccggtacattcgccttaaagtatgaaattaaagttcaatttatatgtttcatacttatttatacgtaataaaatattgtttgatataaagagttttcattatatcaaatataatacttttctttgcttttgtactttcaaagttcaattaaagtttaatttcatacttaaaacagatgagttcatactttatattcgcccttgtactgacggtgctgtacatcgtctattacgcggtcaatattacccgtgacctgtatggaaagaagggaacggagaagactgacgaagaagttttcgacctcggtccgatggatgccacggaagagagtgtcgaggtttcggagaacgagaccgggtttagtatcggaaatgagacatgcgacacggaagccgtagctgccccgcctgcggtacaagacggcgatacagggaaaaaggaggcagccgcgaaagagcggcttgaaaggctgaaggccaaggcggaggcgcagatggaagagatcgctccctacctgtccgacggctttaccgacgaagagatgtataaggcgttgatttccaaaggacgcttggacaaccgtccctgcctgaaatggagaccggtcaaagataagctgtaagatgtcgaaaacgaaaaagatactatgtgcgctttgttccatcatcccctgttcagctctggcgaaaagcggcagcgtgaattacagttggggtgcggatgcgctggcgacgatgcacgactacgtggtaacaatgatgttttacgtccaagctctctgttgtgccatcgccgggatttgtgtgattgtgtccggattccagatttacgtaaagatgaacacgggcgaggacggcattaccaagtccgtcgtaacgcttgtgggcgcgtgcctgttcctgatcggtgcgttcctcgtctttcctgcctttttcggctatcgcatatagaaacgggaggcaggaatcaagtaccgccataacgattcgaaagaactgcaatacttaccctaaaataaataatcatgtttcaaaaaacaaaaagacaaatgaaaaaaatgttttctgctaaaaaagtacagatgctcacactgatgttgctgtgtggcacgacggccgtcatggcccagaactccgcaggcgattattccgccggtacgactgcactggctaccgtgacggaggaaatcgccaagtacgttcccatcatggtcaaactgtgttacgccattgccggtgttgtggctatcgtaggcgctatctcggtgtacatcgccatgagtgcgtccgtaatggttgcatgataaattcctctttagcaagaggataggtcagggttcaagtgatctacttccacccaaataagcccgaggggaaacctaaaggtgaaaatagcactttgggaaagcaataagtcagtcaaaagccagactgcgactgaattgcgagggagaaagacagatatgaggataaagtccatactgattgaacgatagcccagcggcaaaagatgtagctgcgacggaaggcttttacaaacgtcgcattgtggcactaagacaacgtcattggtgttatagcaaagaaccagccacaacgcaaccgcagtaagcggagaaaagggcggaagtcgtatccgacaatctgtcgtgctaatagttatcatacagctaaacggagattacctaagttggaaagccatgaaagtggctatgggctttggctctgaatatccaatatggtaacggagttcccatagtagtccgagcaaggtaatgccttgtacatggcgaaggggaacagttagtaatgttttaatacaaattttgaaaacgtgtaagacgtatggaaaaatcagaaagagtattaaaagctctaagtgaccacagtcaaagttcggattataaatacgagcgactgtatcggtatctgttcagtgaagagatgttcgctgtagcctaccaacgcatctatgcgaagcaaggcaacatgacacccggaactgacggcaagaccatcgatgagatgagtcttgaaaggattgaaagattgattgtgtccttaaaggacgaaagttaccaaccccaccctgcacgcagagtgtacataccgaagaagaacggcaagaaacgtccgctcggtattccctcattcgaggacaaattggtgcaggaggtagttagactgctgcttgaagctatttatgaaggtcattttgaaggcacttcacatggtttccgaccgcatcgaagctgccacacggcattgggtatgatacagaagtcttttgcgggagcaaagtggtttatcgagggagacatcaaaggcttctttgacaacatagaccacaacgtactgattagcattcttcgtgaacgcatatcagatgaacgcttcctcagacttatccgtaaattcctcaatgcagggtatgtggaggactggaagtacaacaagacgtactcaggaactccgcaaggtggaataatcagccccatgctggctaacatctaccttgacaagttcgacaagtacatcaaggagtacgcagccaaattccgcaaaggtgacagacgcagcatcaatcccgaatactggcgtttgaacaataagaagaactggctgaaaaagaagttgcagaaaacatccgatgagcagatacggaaaagctatctgtatgaaattgcccaactgagcaaacagatgctgtccactcctcacaaggatgcaatggatgcggactttagaagaatgcagtatgtaaggtatgcggacgatttccttatatcggttatcggaagcaagtctgaatgcgagaccatcaaagcggacatcacccaattcatgagagaacaactcaaacttgaattgtctgatgagaaaactttgataacacacgcacaagacaaggcgaaattccttggatatgaaatcttcatcagaaagtcagacgcagtgaaaaggaataaggacggagttctcaaaagagacttcaacggcgcagtggtgttaacccttaactcggctgtgatacaaaagaagctcactgagtacaacgcgttggaggtcagaaacattgatggcaaagacatttggtggtcaaagcctcgcagatatatgactccaatgaagcccgaagatattcttgcccaatacaatgcggaaaccagaggactttacaactactattcacttgctgcaaacgtgtccaaagaatgtgcatctttcgccttcattatgaagatgagtatgttcaagacacttggctggaaactgaacacttccgcaaggaaagttcgccagaagtatcagaaggacaaggactttgtcattccgtacaacgatgccaagggaaagcagaaatacagagtcttctacaatgagggtttcaaaaagagaaatgctcagttcgatgttgactatgacaaactgccacagaccatgtacgtgccatatccgagccttgtggaaaggttgaaggatggcagatgtgaactatgtggtaaggaaggaaaagtagtcatgcatcatgtgaggactctcaccaagctgaaaggcaataatgagtgggagaaactgatgctcaaaagacatcgcaagacactggttgtctgtgaggactgcaactctatgattcagaactatggtaaagagtaatgttactaatggaaagccgtatacatggagacatgtaagtacggtttgggggcgagtactcggaaaccgcccaccgcaaggtgggtatggcgctgggtgcttagcccacacaacgaggagcaggacgtcaagaagaagatcatgatggtcgtgggagcctgtatcttcctcattgcggcggccaaggcgttgcctctgttcttcggtattgccgcttaaacatcaaggataagtatgaaaggcaaggacgaacgctatccggactacccgctgttcaagggactgcaacggcctcttgagtttttgggcatccaaggccggtatatatattgggcggcggtgacgacgtgcggagccattgtcggctttgtcgccgcctactgcctactcggtttcattgccgggcttgtcgtgctggcagccaccgtagcagttggtatcgtgctcatcctcctcaaacagcggaaaggactgcatagcaagaaggtcgctccgggtgtgtatgtgtatgcccactcgcgcaagatctgacgaaagaaaaaccatcacggcaatgtgcatggctttattgattgttgaacgcgggcgggtttgtcttgaagcaaggcgaacctgcccctatttaattacacgtatatcgaaatgaccctatacatcattttatgttttgtcgctttgtgcgctggtatggccttgtcggtttatgcgttcggtacgggcggcaagcgcaagagaatctttcaggacatctatttctcggcggaggaaacggacggtgtgggtgtgctgtataccaagaccggcgaatactccgccgtacttaagatagagaatccggtacagaaatattcggcggacattgacagttactacgacttcacgcacctgttcaccgcccttgcgcagacgttgggcgaagggtacgccatccacaagcaagacatcttcgtccggaaacagtttgcaagcgaaccggctgacggacaggagttcctgtcttcatcctatttccgttatttcaagggacgtccctacacggacagcctttgctacctgaccatcacgcaagaggcgaagaaaagccgtctgttctcgttcgatagcaaaaagtggcgcgacttccttgtgaaaatccgcaaagtacacgaccagttgcgtgacggcggcgtacaggccagattcctgaacaaagccgaagcgagcgagtacgtcgatcgttacttcgccatgaacttcaaagaccgcaccgtgtcgatgacgaacttcaaggcggacgatgaaaccgtgtcgatgggcgacaaacgctgcaaggtgtatagcctcgtggacgtggactgtgcagcactgccctcactggtacgtccgtacacgaatatcgaggtcaacaacacggaaatgcctgtcgatttggtgtcggtggtggacagcatcccgaacgccgagacggtagtctataaccaaatcatcttcctgcccaaccagaagcgtgagttgtcgctgctcgacaaaaagaagaaccgccacgcgagcattcccaatccgaacaaccagatggctgtcgaggacatcaagcgtgtacaagaagtcatcgcccgtgagagcaagcaactggtatatacacacttcaacatggtggtggccgtgtctgccggtgcagacctgcaaaagtgtacgaaccatctggaaaacgcattcggacgcatgggcatccatatcagcaagcgggcgtacaaccaactggagctgttcgtcggttcgtttccgggcaactgctacacgctcaatgaggaatacgaccgtttcctgaccctttccgatgcggcgatgtgcctgatgtacaaggagcgtgtgctgcacagtgaggaaacaccgctgaagatttactacaccgaccgtcagggcgtgccggtggctatcgacatcacgggaaaagagggaaagaataaactgactgataattccaattttttctgtttggggccatcgggtagtggcaagagctttcatatcaactcggtcgtgcgccagctccatgagcagggaacggatgtggtcatggtcgatacgggaaactcatacgagggactgtgcgagtatctgggcggcaagtatatctcctataccgaggaacggcctatcacgatgaatccgtttcgcatcaaccgggaggaatacaacatcgagaagatagacttcctcaagaaccttatcctgatgatttggaaaggggcggacagccagattcccgaaatcgagttccgcattgtcgagcagataatcatagactactatgatgcctatttcaacggatttacaagatacaccgacgagcaacgggaggtactgctgaaaaacctgtttgcggcggccagccgaaagaacccaaacaaaccacccagagaggtggatgagatggtgcgcaaacagatagaggtgcttgaggcacggcgggcggctctcaaagtgtcggaactgaacttcaactcattctttgactactcattcgaccgtctggagcagatctgcaccgaaaatgacatcacgacaatcagctactcgacctattcgaccatgctgcagccgttctacaagggaggcgcgtatgagaagattctcaatgagaatgtggattctgcactgtttgacgagacattcatcgtcttcgaggtggatgccatcaaagagaacaagaaactgtttcccattgtcacactgattattatggacgtattcctgcagaaaatgcgcatcaagaagaaccgtaaagtccttgtcatcgaagaggcgtggaaggccattgccagcccgctcatggcggaatacatcaagttcatgtacaagaccgcccgtaaattctgggcttctgtcggcgtggtgacgcaggagatacaggacatcatcggcagtgaaatcgtgaaggaggccatcatcaacaactcggacgtggtgatgttgctcgaccagagcaaattcaaggaacgcttcgatgaaatccgaaagattcttggtctgaccgaggtggattgcaagaagatatttaccatcaaccgcttggagaacaaggaggggcgcagcttcttccgcgaagtgtttatccgccgggggacgaccagcggcgtgtacggcgtggaagagccgcacgagtgctacatgacctacacgaccgaacgggcggaaaaggaggcactgaagctttacaagaaggaacttcggtgcaaccaccaggaagctatcgaggcatattgccgggactgggatgccagcggtatcgggaagtccctgcctttcgcacagaaagtaaacgagacggggcatgtgctcaacctccgtcccgcacatgaatccaaataagcattgcagccatgaaacgactactccttatcctgaccatcgcctcggtcgcactctgccagacggttcacgcccagtattacagcgtgaactacgacacccgtaccgttgcggcgatggtggccgctttcggtacggaagcggtcgccgaagggtactaccgggagcaggtcgatgacatcctcaagcactacacggcagcggaggtcgctaccgccgggatattcgccgccaagttcttggagcataaagccctgagcgacctcggcatctggaacagccgcacggaaaactactactaccagcgcatctaccggatggtggcggagaaaatcatgcccaagatatgggtggtggcgaagcagatgctccattcgccgcagacggctatctactggggcagttacctgatgaaagtctgcgatgataccaaaagcctgtgtatgcagttcgagagcgtggtgaccaacagcacgctgaccttttcggacatcgcctttctcgaaatcaatccggagattgcccccttgctgaagctatccgaaacgggaaacatcgactggcagcggatgatggacaacttcgcccgcataccgggcaacttcacgcacgagaatctgagaagcgacctcgacaacctttataacacgggtgtcggtcttgcaacggctggcattgccaatctcggtgacgccctgttgcaaagcagctcgttccatgacctgctgggcggaaaggttgaagaaatcggcaacctgtatgaacactacgggagtctattcgagcaggcggaacatgacatcggcggcctgctgattgacatggtgggtggtccggataacgtagccggtctgttcaacttcagcaactacaatcttacggcgtggatgaccgactacctggacgaagcgatggggaactattacacgcagcggtggtacattgcccggcgtgaccaagggagcgtatcgctgtgcgactactatcctccgacggacgacaacagcatcctgaacgggggcgcatgggtgcggttcaacacgagcgacccgaatttctatcccaacgcctcgcaacgggaacaggtacttgccaattcggaaggatatgccggctggtcgagaagccgcgtgcgacagttgaacgaccagaacgacgggttcaactacagcatcaactattggatgagtgcttacatcatcagcaagaaaaacaagcagaccaaaaaggcatacgcatacgaaatccatgtgagcaaaagctggaacaaagaagaggtcgtctatgaggaagtcttcgattcctactcgatggacttgaacacgtttcgggcgcaactgaatgtccggcttgcggagttcaacgaaaacgaggacggctacacctattatatatcttccggtgcgcggaactattaccaagcaacggacgccgccaaattgaagggatgcgagagcgtgaccatcagcgtgacctgttccgacggggttacgctcggacaaggttcgacacagtacaagtgccgtaaatgcggtagttcgttgaacgcccataccaaggagtgcgccatgcagacctcggtgacggaaaataacctcgacctttcggaactggatgcgctgttgaatgaggcgaacagtcaggtcgccaatcttgaagcacgaatcgggacattggaaaacgagaacgctgtcctgctgaaaaaaatcagtacggcaagcatcgaggatgcggcggcctaccgtcaacagtacaacgcaaacaagacggagacagaccgtctgaaaggcgaactcgcggagtggaaaaagaaacagtccgactatacccaagcgaaatcggaagccgcagacgacaacagcgtggcgacggacgactattaccgcatccctgccatcatgcacgactgcaaggcggcatacggtcttacttggcaggacggcggagcatggaacggctactcgtatgtacgcaaggcggccatgccgaacatcaacggcatcatcacattcaaggctgcggtctccattgcccgtaagccgaaatattttctcggcataaaaatacaccgtgccattatccaaatcaagtgggaactcacctcggcttatacggacacgcacgtcgccgacgtgctgacccttgatccgggactttcggatgcggaaaaggccaaactggtaaacgaccggatagccgaaatcgcccgtgagcatccgtcctgtaaaatcacgacggaatacgcccgcagcgcaccgacggaggaaacgccatcaggcgacgtgtaccatctgctgtggtcgagcgaccgccttgagatagcgcgagaggtggacagcagaatcaccaagatatatgccgacttggtatcgctggaaaagatgatgcactacaaacggagcatccttgacgtgatgaaggatgtgctgcccggactggacacggacgaaggccgcaggctgacactcgtggaggaatgccatgaccgctgggtggagaacgcacggacactccgaaacggaaataacagaaatggcggaaaggaggtgcggccatgaaacgaaccatacggatagccctcgtgctgttcgccctgctgcccggtatcgccaaggcgcagtggactttcgatatagtctccgtcgaagcctacatcaacgaccacaagaagcagcgcagtctgctgttggcccgcagtaccttggagtacagcaacaaactgttgcacgagtacagcagtaaggaagtcgggagctataaagaactgaatatcgaccttgaccggtacacccgtgcgttcgatgccatcgatgtcatgtaccagtcgttgcgcacggtgctgaacgtcaagaatacctatacatcggtcagcgaccgtatcggcgactataaattgttgttggaggatttcaatgcgaagatcttgaaacgtggacgcatcgaatccgcagataccctgattatctccatcaatgcgagggggctgagggcgattgcccgtgagggggaacagctctacaagtccgtgagcgacctcgtgctgtatgccaccggagcggcagcctgctcgacctccgacctgctgatggtgttggaggccatcaaccgctcattggacaacatcgagcggcatctgaaccgggcctatttcgagacatggcggtacattcaagtgcgcatcggctattggaaagcaaaggtatatcgctcccgcaccatgcgggagattctcgatgacgccttcgggcgttggcgcggagccggaagactggattattaacgacaaaaagagaagaatatgaacagaaaactattactcatggcagtggcggtcaccgtaacgacagccgtacacgcacagtatgtaacgtacaaccatgattcgtcgaagcagaatcaggtaacggtcatggaaaccggtacgggcgcactctcgcccgacctctattattccgtgctgcacaacaaatacaagaagtcggcggcggccaaaaacaagctctcgttccgcacacttgccggtatcaatctctacaaccaggtggacgaagcggaagccattgattcggctttggtcaagcgggcgaaggtcgaggcgttgaacgttgccgaccggcaggtggacatcgcgtggcttgccgagggcgataaggtcagcagacagatggaacggttccggcgcaacatcgaccgtattctcctgtccggcggtactccggccgacaaggaacggtggacggaatactaccacgtctatcagtgcgccatcaacgccacgaaagacgcctatatgccaaacgcccagcgaaagaaggagtatctgcgcatctacgaggatgtggcacggcagaacgagattttagtgagctacctcgccaagcgtcagaacgcaacggcaacaagcacactgctgaacgcaacggacaaccgtaccctgcataagggcggcattgtccgcaatgccatgagccggtggcaggaatcacgccttgcggtgcgtggctcgcaatcgggcggcaacggaaacggcgaagatgacaacgagagtgtaaacagagggaaataaaaagacagggctatggcaaacggagatatactttcggatttcggcatcaacctgttggaggaggaaatagatgatgtcatctttcagaccaacgagtttctgacggacgcgacttttaccggtgcgcagggacctttttggtggatattgcagatgtgcatggcactcgcggcactgttctccatcgtcatggcggcaggtatcgcctacaagatgatggtaaagcacgagccgttggacgttatgaagctgtttaggccgcttgccgtgtcgattatcatctgctggtggtatccgcctgcggacacgggtatggcggggagccggaacaactggtgttttctggactttctgtcctacatcccgaattgcatcgggtcgtacacccatgacctgtacgaagctgaagcttcacagatatcggacaggttcgaggaagttcaacagctcatccatgtgcgtgacacgatgtacacgaacctgcaggcgcaggcggatgtcgcccacacgggcacatccgatcccaacctgatagaggcgacaatggagcagaccggcgtggacgaagtgacgagcatggaaaaggatgcggcgaagttgtggttcacgtctttgacggcaggagtcatcgtggggatagacaaaatcatcatgttgattgccctcgtggtgttccgaatcggttggtgggcgacgatttactgccaacaaatcctgttgggaatgctgacgattttcggaccgatacagtgggcgttcagcatcctgccgaaatgggaaggtgcttgggcgaagtggctgacacgctatctgacggtgcatttctacggggcgatgctctacttcgtgggcttctatgtgctgctgctctttgacattgtattgtgcatccaaatcgagaacctgacggcgataaccgccagcgagcagacgatggctgcctacctgcaaaactcgttcttctcggcaggctacctgatggcggcttcgattgtagccctcaagtgcctgaaccttgttccggacttggcggcatggatgataccggagggcgacacggcattctctacccgaaacttcggcgagggcgtggcacagcaggcgaagatgacggcaaccggagggttgggcggcatcatgagataatccgcaaaagataatataaacccaataaaaatcataacaacatgaaattgcaagagaaaatcaaaagttggtgcaaggatgagaaattcatgtcctttgcacaggaacgagcgagaaaagaggtttacgaggtggcggaaaaccaccgcatcgacccgcagtatgaagaactggacgaagccttcgagtacgacgaccggtacatcgcccccttggtgacgtacctgacgtacaagctgcgtcttgctctgctgcagcggaacgcaggtaagcgcaaaagaggaatctggtgggtgcttgtccacgtggagatgcagggctattacgtggagatattctcggcggagttcgagaatcttttgacggaacttcgggatgcggtcatacccatgctgcacacggaatatgtacagatgttgaacggtaaaagggaataaccgatggtcatcaagaatttggaaaacaaaataagactggtgggcatcatctgtaccgcttttctcgtgggatgtgtcatcatcagcttgtcaagtatctggacagcccggacgatggtctcggatgcgcagaagaaggtgtatgtgctggacggcaacgtgcctatcctcgtgaaccgcacgacaatggacgaaacgcttgacgtggaagccaaaagccatgtggaaatgttccaccattattttttcacgttaccgccggatgacaaatacatccgctatacgatggaaaaagcgatgtatctggtggatgagacggggttggcacaatacaacacgctcaaggaaaagggtttctactccaacattttgggtacaagttcggtgttctccatctattgtgacagcgtggctttcaacaaggagaagatggagttcacttactacggacggcaacgcattgagcggcggagcaacatcctcatgcgggaactggtcacggcggggcaactcaagcgtgtgccccgaacagaaaacaacccgcacggattgcttatcgtgaactggcgaaccctgctgaacaaggacatcgaacagaaaacgaagatcaactactaaacaacggagtttatgaatatcaagggattcaggcggatgctcttcggtgaaaagatgccggacaagaacgatccgaaatacaaagaccgttacgagcgggaggtgtccgctggacgaaagttcgcccaagcgacacgtattgacaaggctgccgccaaggtgcagggattcgccaacgcacaccggatactttttctggtcatcgtctttggtttcgctatcggagggttcacttggaacatctatcgcattacaatggcataccgcaacagccggccgacacgcacggcgacggaaatgcaggattcggtgctacgggaaagacacaagaggctgcaagggggtgaaataagggaaaatcggaacgagaacaagaaatatgaaccgcaataaaggagtgcttatgaatacacgatttgaaaaatcagtccgctcgtcggacgaatggtacaccccgaaggaggtgttgaaagcgttaggcaggttcgaccttgacccttgcgcccctatccgtccgttgtggccgaccgccgaagtcatgtatgaccggaacatggacggattgtccctgaaatgggaagggcgtgtatggctcaatcctccgtactcgcgtccccttatcgaacagtttgtccgaaagctggcggaacacggcaacggcatcgcgctgttgttcaaccgttgcgattccaaaatgtttcaggacgtcattttcgagaaagcgacgggcatgaaattcctgcgccaccgcatccggttttaccgcccggacggaacacgcggcgattctcccggttgcggcagcatcctgatcgcattcggagtggaaaacgcagaagtgctgaaaaactgcagcattgaaggcaagtatgtacaactcaattaaaagatgtatgatgaagatatttgataaaatcaatttcagggagccgaagtatatgcttccggctgtcctgtatatcccgcttctggttgcatcgtacttcatcttcgacctgtttcataccgaaacggcggagattccggacaaaacgctgcagacaacggagtttttgaaccccgatttgccggatgcccggcttaaaggcggtgacggcataggcagcaagtacgagaacatggccaaatcatggggtaagatacaggattactccgcagtggataacatagaacgagatgaacccgatgacaacaaggaagaatatgaatcgcaatacacggtggacgacatcgccttgctcgatgagcaacagcaggaaaaagctgcggcagcgcaaattgccgatgccaagacacgcgagcaagaagctctcgcggaactggagaaagcccttgccgaagcaaggttgagaggacgcaatgaggtattaccggcgaccgatacggacagtaccgcatcggcgcaacccccgacggcaaccatagaggtcaagggaaaaatagaggaagagagccgttcggtaaaagccccgtcagagaacgaaccgcccagcgaagtggtacgcaaggtaaagacggcttcggattacttcaatacgcttgcggtcaatgcccgtgaaccgaaactgataaaggccattatcgacgaggacatcaaggcggtggacggctcgcgtgtgcggttgcgtctgctcgacgacgtggagatcaacgagtgcgtggtcaaacgagggtcgtatctgtatgccaccatgagcggcttctcgtcggggcgtgtgaaggggaacatcaccagcattctcatcgaggacgaactggtgaaggtcagcctgtccctttacgacacggacggcatggaagggctttatgtaccgaacagccagttccgggaaacgagcaaggatgtggcaagcggtgcggtgtcggggaatctgaacatgaataccggcagttacggcaacagtctctcgcaatggggaatgcaagccgctacgaatgcctaccagaaaacgagcaatgccatcggcaaagctatcaaaaaaaataaggtaaagctgaaatacggcactttcgtctatctggtgaacggacgtgagaaacagtaaaaacggaagccatgatagagattgacaacatatataatatggactgtatcgagggtatgaagctcatggcgaacggcagtgtcgatgccgtgatagcggatttgccttacggcgtgttgaaccgtagcaacaaggcggcacactgggacaggcagataccgctcgaagcgttgtggaaacagtaccgcaggatcaccaagccgggaagccccgttatcctctttgcgcagggcattttctcggcgcaactcatgctctcgcaaccccggatgtggcggtataacctcgtgtggcggaaagaccgggtaacgggtcacctgaatgccaaccggatgccgctacgccagcatgaggacatcatcgtgttctacgaccgtcagccggtatatcatcctcaaatgacgccgtgtccaccggaacggaggaatcatggacgccgcaagacggacggtttcacgaaccgctgttacggtgaaatgaaactggctccggtgcgtgttgccgaagacaagtacccgacctctgtcatttccatacccaaggaacacaagacaggagcattctatcatccgacacagaagccggtagccttgatagagtacctgatacgtacctataccaacgagggcgatgtggtgctggacaactgcatcggttcgggtacgaccgccattgccgccatccgcacggggcggcattacatcggattcgagattgaaccgacgtattgcgaaattgccggacgacggattcgggaggaactggaacgtggtcatggattaaagaaagcgaaataagggaaataaagaaataaacaatatcaacagaaacgatatgaacaagaaaataattgtaactgcatttcttctggcggcaggactttttgccacacggaacgcacaggctcagcgtacatacgaagagatggaacggctgactgtcaatgaacaggtaacgaccgtcatcacagccacggaaccggtccgcttcgtggatatttccacagacaaggtggcgggcgaccaacccattgagaacatcatccggttgaagcccaaagagacgggacacgaggacggtgaagtgctggccatcgtcaccatcgtaacggaacgctatcgcacgcagtatgcactcatctacaccacgcggataagcgaggcggtggcagacaaggaaattcagctacaggaacgggatgcctacaacaatcctacggtctcgatgtccacagccgacatggtgcgttttgcaagacgggtgtggaactcgcccgcgaaaatccgcaacgtggcgaccaaggcgcaccgaatggtaatgcgcctgaacaatatttactcggtgggcgactatttcttcatcgacttttccatcgagaacaaaacgaacatccgtttcgacatcgacgagatacgggtgaaactgtcggacaagaaactttcgaaggcaaccaacgcgcagaccatcgagctgacgcctgccctggtattggaacacggcaagacgttcaagcacggctaccggaacgtgattgtcgtgaaaaagatgacctttccgaacgacaagctgctgaccatcgaaatgacggaacaacaaatcagcgggcgcaatatcagcctgaacattgactacgaggatgtactgtcggccgattcatttaacaccgctttattggaggaggaatgacgatgaaaaagacgataatactgatgcttgcctgcatgtgcgtcttcatgaatgcaagtgcgcagcgtaacagcggccgcctctcgcttggagtgggattgctgtatgagaacggcatggacgtaacgcttgcttacgaacatgaaatgaactaccgccatgcgtgggagtttttcgccaacggctatctgaaatggacggaatgtaaatcttgcggtcatatttgtccggaatccttctggcgcaactatcgcacttacggtttcggtgtggcgtacaaaccttgtgtggtgcgtggacgcaaccattacggcaacttgcgtatcggagcttcggcagggagcgacacgaacaagtttcttgccggaatccatgtgggttacgagcacaattatgtgctgcggtcgggatgcacactgttctggcaggtaaagagtgacatgatgataaaaggggcggatttgctgcggacaggtatcgtgctgggggtgaaactgccgataaaataaaggaaaaacaaaaaacgaaaataacatgatacgaaagattcaatggtttgcaatggcagtgacggcggtattgtgcgctgcctgtgacgcccatatcgacgtacctgatacggcggtacgtccgggacatattctctgcgaggacggtacggctttatcctacgtacagtatgaacagtcgggaaaacgggcaatagcggttgtcttcgataccgaacaccgtgaaggtacggaagggaacggctatgcggtttacctgtgggacattgctccggcagcttttgccgacagcctcggtgtcgcacaagggacgtcggccgacatcgaggctttggacgggaacatgaacacctttgcgctgtacgacacacgggagacggcttcgcctatggcggaagcggtctttgacctgtggcggtacggacagagtgcctatatcccgtcggtggcacagatgcggctgctgtatgccgtccgggaaaccgtcaatcctgtcatcgaacggtgtggcggccatccgctgccgttggatgaaaacgactgctggtactggacatcgacggaggtaaccggacaggaaacggcgaaagcgtggctttactcgacaggaagcggtgcgatgcaggagaccccgaagacacaggcgcacaaggtgcggccgattatcacactgaacaggtaggaacgaaaagagggaaaggacaaagacaatggaagaaagcaaggaactacaaggattttacaagatattccgtgcggtcatctatatctccgtgctgatggagttcttcgagtatgccatagaccctgccatgctcgaccactggggcggcatattgattgatatacacgggcgcatcaagcgatggatgatctataacgacggcaacctcgtgtatagtaagatagcgaccttcctactcatctgcatcacttgtatcggcacacgcaacaaaaaacacttggagtttgacgcgcgcaggcaagtgctatatccacttatctgcggattgttcctgattgtgttctccgtgtggctgttccatcatccgatggaaacgagactctacaccctgccgctgaacatcatcttttacatggcgaccacgcttgtcggtgtgatattggtacatatcgcactggataacatctcgaagttcatcaaggagggactgggtaaagaccggttcaacttcgagaatgaaagtttcgagcagagcgaagagaaggtggagaaccagtatagcgtgaatataccgatgcggtactattacaaaggtaaatttcgcaagggatgggtgtcgataagtaactgtttcagaggaacatgggtggtcggaactccgggcagcggtaagacgttcagcatcatagaaccgttcatccgtcagcatagtgccaagggcttcgcgatggtggtctatgactacaaatttccgacacttgccactaaactttactatcattacaagaaaaaccagaagctcggcaaagtgccaaaaggatgcaagttcaacatcatcaacttcgtggatgtggagtacagcaaacgggtgaaccccattcaggcaaagtacatcaataatcttgcggcggcgagcgaaacggcggaaaccctgttggaatccctgcagaaaggcaagaaagagggaggcggaggcagtgaccagttctttcagacttctgccgtgaactttcttgccgcctgtatctactttttcgtgaactacgagcgggaaccctacgatgtaaacggcaagaaactgtatgcggagaagcggcaagatccgcaaacgaagttctggaagccgacaggtgttgttcgtgaccgtgagggtggcagcatcgtggaacctgcctattggctgggaaaatactcggacatgccgcatatcctttcatttctcaatgagagctaccagactatttttgaggtgctggagacggacaacgaggttgcgccattgctcggtccgttccagacggccttcaaaaacaaggcgatggaacagttggaaggtatgattggtacgctgcgtgtctataccagccgtttggctaccaaagaatcctattggatattccacaaggacggggacgacttcgacctgaaagtgagcgacccgaagaatccgagctacctgctgattgccaacgacccggagatggaaagcatcatcggagcgttgaacgctctgatattgaaccgtctcgttacccgtgtgaacaccgggcaggggaaaaatattccggtcagcatcatcgtggatgagctgccgacactgtatttccacaagatagaccgactgataggtacggcgagaagcaacaaggtaagcgtaacgctgggttttcaggagttgccgcagttggaggctgactacggaaaagtgggaatgcaaaaaatcatcacgacagtgggcaacgtggtaagcggttcggctcgcgcaaaagagacattggaatggttgtcgaatgacattttcggcaaggtggtacaggtcaaaaagggcgtgacgatcgaccgggacaaaacgagtatcaatctcaatgagaacatggacagtcttgtacccgcctcgaaaatttcggatatggcgacgggatggatttgcggacagacggcacgtgatttcgtgaagacgaaaaccggtacaggaggcttgatgaacattcaggaatcggaagagttcaagactacaaagttcttctgcaagacggatttcgatatgagggagataaaagcggaggaagcggcctatgtaccgctaccgaagttctacactttcaagtcgagggaggaacgggaacgcatcttgtataaaaatttcatacaagtcggacaggatgtaaaagacatgatagcggatgtactgaacaagcgtggggcgaaataaatcaaaatccctgcaataatttacgtggttattgcagggatttttgtattccattcagctacccgaaatcttgcggacataaatgaatcatctgacagtttccgatttggaatcgttttccgacagcagattttgtaatttgtcgatgtccggtagagtcttgcgcaaattttccggcatttcttgggctgtgcggtatgtcgccacgcccataggcttatcatagtcgcgcaccatgatttcgacaaactggcggttggcatcctgacataggacaataccgattgaagggttctcgtgcggtttcttgtcggtcatatcatatacagtcagataaccgctaagctgtccgagataattcgggcggaacttgccccgtttcaattccacgattacgctggcattcagttctctgttgaagaatacaaggtcagcaaacatttcctctccggcaactatcaggcgatgctgactgtcgataaaagtgaagtcgtttccaaaacggagaatgaactgcttgatattggttacgatttggttttcgatgaccttttcgttccagtcctgttcgcgttctcccacattctccagattaaccatttcgagcatatactcatccttgaacgccaatgtcgcttttacggcataaatggcttcgggcagcacttgaaggaagttgctcggcaaagatccgcgatttgaatagatgtcttctttcaagtaatttttgagagaggatagcgaccacgcattttgagcggcacaatggatatagaacaatcgttctgcgatgtcttttgaacgagtcaggatttcaatatgatgtgaaaagctaatcttgacaaaatcgtcccaggtaaattcggtattgaccggttgcccgataagttgcagcagtagatgctcgtcaatatccaattcgcccaacgctgttggatgaattaaagccgtacccttttccgacgaatggttttccaattcgcccaacactgttggacgaattaaaaacgtcctccattcctcatagaatgagcgcatccgtttcaaccccgattcagaaaagccgtgcagaccgggcaactcccgttgaaggagctttgatatggtaggcaatgctttagtaccccaacagccgatgcgggaattttcagacacgaatttccccactccaaaatacaacgagagagtttctttgttgaccgcagccgcacttctataccggcagcgttcgatggcatgtttgattatctctactgcctctgcatattgtgtataatccgatgggataacttgttgttccatatacatacgtttttgtgccgcaaaggtacgaaaaatacgggatatacagggcagaatgccaacatattatagtgccgtgtgggtcttattcggtatttttagcgttccggtttcctgcactcgctttgctgccaatctactcacttagatgttcatgcgtctggggcgtgccgagaaagccggtagcggtgtggataagattgtgagcggttggcagtctttgggttggccgcttcctactgtagccgaggaaacacgtccggactatgttgtgctgaccttgcagttagggatgaaaacccgacaagaaaacctcgcaagcaggatttgagaaaagagcaaatcttggagttctgtgttgagccgcaatccctatctgatattttgcaacatttaggattgaaagatagggaaaatcttatggaggtctatatcaatccgatgattggtgcaggggtattggaaatgacggagccggacaatcccacaagccgtaaccagatgtatgtaacggtaaaagtggaacaagaatttcaaaagtaagtttataataggatattgcggcttggacgcatccaacctcatacaaataacactgcccgcgtgaaaatgggggcagtgttatttatatggtagttcgcttatttaagctcgtgtaccgcttaaaagttcggcaagttgccggtcgcagaatttatcgtattcctccttgtctgtaccgctttcgatagcccggtcgataacatcgcccagttcgtcgaagcagacttcttcattgacacactttgcattgctatcatcttctttcagtagatagacctcgtagtaatcagagccgttgagagcgataacgacatatccggcgtgtaaccgtccgtttactttcagccgcagtgccggtaattcttggaataccgtagcgacaaattcgctgactccccacgacataaagacgggtatgggggtaaatgacagtaattgttctttgatggtctgtgcgatgtgcattacatactctttatccataactttgatttttaatatgattattgatttatgttagttgaaccattcggggttatcctcttttaattccgtgatgagttcatcgtccggtaatttgagggtcttcgcatcggcgaaaaagaaaacctcgtcatatatttgttcggcttccttacttgcaaacccttcgctctcgtcctcgaaactgcccggatgaagtgcatcgagcagagcggtagagccgataagtagttcttcaccttcgttggatttcacgatacggcagatgtagatattgccgtcaaattgtagttctttcgttttcatacgcctgttatcttaatgggatatgtctcccgtttgccttgaggtattccatgatacgcttcgcttcttcgtgcgatgcacggttgcggtcatcgtaattgcgtgtctcgtctgccatgaccacgatacactcctttaccaacctgtaaaggctttgctgcagcgtggggtgcatttcggggatagcggctgcaaaccgtttgggattgaagccgtaatcgttcactgctctttcccagtctttggcgagttggtactccttgctttccttgatgttgtccataatcttgaattttaatgatttgtttttattttcccttcgttcgattcctttctgtcggaaccgctttgggattttatggatgcggtacacggctgtcggtacagcttcatacggaaggcttttcctgccaattactctttcagggaaaggaagaatttgcaggaaatacatttcaagccgccggatcaagcgcgacggccgacctttgcatctgataaaaccaaaccggggctgacagggaatgaagctggggaaacgctataaaagggaagttgaaaatggtaaaaaagagaggaaacgaaagctatgaatggaggaagggtgggtggtgacgggttcgtcagaaagttaaaagaggtacttgggtcctttgtccggagcatacaaaaatgaatagagggcggatttccccccccctattcgttatgacaacaacatttgtcaggcagctatttcttccgtttgcggttcggtctgtgcttccgcttcgggttgcggttcatcgggttgttccgcttcctgcgtggcttgttcctgcaaagcggcttttttttccttaatgcgttggtgccgcttttcgtacacttcattatatccgtcttggatattggcaagttcttcgggcatatgcttttgggcgaagccaagcaacagggaggctgtggcgttgttaccgaatgcgtccttgaaattggcaatcagataatccctgcggataacggctttctgcttggcggtaaggttctcgatgatgcgcattttgtcctcgctcgtaaggtagtaataagaacctttatcttcaattcccacctcattgaaatgctctttgcggagtgaggagagcaggaagaaatacaccattttctcctcgtcctgtccaaatttgcgctctgacatatcgacctctaaaatccgctttttggtgtcttcaacggtcttttcgagggcaatctccttgttgcgtttgtcctgcttttccaacttctcgataggtgaaagcggcatttcggttgctgtaccgtttacggtggtagcggtatttgcaacatagcacagtgtaatgtcgttgctctcaatacggagatagagggagatttctcctgcttcgcttcgggtgcggattgcttcgcatttttcggtgtaaccgttcaattcctgcccgtaatccttttctgcatcctcgtattcctcggtggtatcataatcctctttttgaggtgcttgggggctttcggggtatttcgttgcataggttttaaggctttccacttcgtagcccatagcggtaagtcggtcgatgacagcttcattgtaattgtagctttcgtggcagaggggaacggcagggtgctgttccatgagccgcatagccttttcggtaaggtgcgatgtgttcatttccaccaagcaagcgcggttggcgcaatttccgcaaccaccctcacagaacaacatcatattattggtattgtgagggcatgaaagacaaagggttttgtcgaatgaatagcgattgaggtctgcggtgtattgccgttcgatgctttgtgccacctcggaagctttcatgcctcgccaactattgtactgcaccccctctttcagatgttggtcgtacacctcacgctgtatctcttccccataacggcagatttcacttgccacgctgattgtgatttcgtcctgctccaacagcaaagcgatttcgggtatcaaggaaacgaatttaagtcgtgtacggatatatgcctccgtcttgccgaactgcacggtcaaggactgtacatcgtggcgaccgctgtctatgagcttttggtaggcgttggcttcctcaatcggggtcacatccttacgctgcaggttctcggtaatcgccatttcctcggctgtctcgtctgaaatttccatgacgatagccggaatttccgccaattcagccatgagggaagcacggtatctgcgttctccgaatacaatctcgaaacggttgtccgcaatagggcgcacaccgataggctgaagcactccctgctgacggatgctctcggcaagttccgcaaggcttgtctcgtcaaagttcttacgtgggttgtagttactcggctgaatgtctgccaatgctaccgatgtgatgttcttctctactgcttgaactgctgttgttgccataatcataaaatttaattggttgatatttgatttttttattttcccttttttcggttcttttctctgcctgaaccgcttgggatttacagatgcttcaagggactgacgaacaagctattttcaacgctttttccggaaaattactctttcgcaggaaggaagaattttacgagaaatgcacttcaaagcggtgaaatcaagcgcggcagtccaaatttgcgtctggaaaaccaaccggcgatggcaggaacgaggccggacaagcggcaagtggaataaataaaaaagtaatacaaccatgcggttataagaggtaatagaacaggagaacacccaggagggtataaacaggaaaaacgctaccttgtggacgtgcccataagatagcggtatgctataaaaggtatatcggatggggactacaaccgccgtaccggttatttctcgtgcttttccaaatactctttcatcgcctcgttcacgatgtcccgtagagacatattcttttcgatggcgaggtacttcatccgggtatgaatacttttgtttatgacaaagttgcaatgtacagcaggctctttttccgttttgaccggtgcaggttctttcttttgcgtggacttcccggtggatgacagcaagccgtccagtccgcttctcatgccgtttttcaatgaatcacttttgcccatatcgtttttattttaatttcaacacttcttttgctaactccatgtagtcctttgccccgttgctgttcttgttatactcaaagatattcatgccttttatcggagcttcggccaatgatacattgtcccggatgacggtcttgaataccttgtcgcagaacgattcgctgattagttccgccacacttttgttgagcgtcttgcgcttgtcaaactgggtgatgacaatgccgccgatatttaggtttgggttcaaacgttccttgacaatcccgaccacatttgtaatctttgccattccgcgcatggcgaggaactgcgcctgtaccgggataatcaggaaatccgccgatgtgagggcgttcagtgtcagcaaacccagcgagggcggacagtcaatcaggatatagtcgaatttacgggtttcaagcaattttgcaatcagcccttttagtattaattcccgccccggctcgttgataagctcggattctgtcgccgacaaatcgaggcaggacggtacaacggaaagaccgttttccaactcgaataccggtaaggtatattcgcctttcatcgctccgtacaccgtccgttcctcttcgatggagagaccgcaggattccgtgaggtttgcctgaccgtccatgtcgatgagcagtacacgctttttcttctgctgcaatgcggcagcaagattgatggtggtagttgtctttccgacaccgcccttgtggttcaaaactgcgattatttttgtcataatttcgtgtctttatatctgatacaaagataatactatttttagtatttactattattagtgtatactattttactacttttgtatattttagtattatagtatctactactatactaaaatactgattgactaaatgtagtgcattctatcatttctgatgggatatttcctaatatcctactttactaaccttagtatatactacatttagtatttgttgtataacagcaaaataagctcattttggaattagtcttataaatcatcatcatgcgcattagataaattctgtctcaagtgcttccaacaagtcgtgtatttgtttttccgcttcctccatatccgatacaatgtccttgatgtggtaaggtgcgccatttttaccgtgcccatcatttccaatccatagataggcttcgtaatccgggtcaaaaccctcgaaatattgttccatgtcagcaatgagggtatcaatgtcctcacatttcatttcggcactgaaattaaaatcctgcccatagttggtatagcgttggaagtcgaactgaatatttgatttatttttgtcatccacacttatactccagcctttgctttgggatatttccgttactttttgtatcttttcttgagcggtcatagttttgagtttatagtggggagacttcacaccgtcctaccgattgctttaatccgttatttgaaagtaatactcctgcagctcgtctggccattcggcggtcatagagcgtggctttctggttgtcccgctcgtgccattgccaaattttgtgattaagtacaaggcacagctctgtccaatgcttgtagttatctttccattctgccttaacctttctgtatgtgtcagctatggcttcattcccgaacttgtctgccatagagaagtcctgccaaaaggttgtcatcgggtcatagccagtaatttccgctatattccacttgggaattactatttttaatatttccatacttattattgtttttgtaatactcatgaatcaagattactatttccctttgttcggtctgtttgcgaccgccgggaagatttttctgctttcagaaggtggcggggaacaatcggacaaggctgatccggaaaaatacgctcgacagcggagaggaagatttttacgtgtcatttgcggcagtatgccggcattggcaggattggagccgccggttacctttgcggaaaattctgttccgtaggtcgcacggcagcggacttgggtttaatgggaatccgttagaaaaggaaagatttatgaataaaagagtgaggcggccagccgggacggactttccgatggactgtcttgggactacagagggcaggatttatcccgccccctgtaatgccaagtctgtccgtgtccgtccttttgcaaaaaggggcttcacgcactttatgtaacgtgttacacaaaatgcgtgaggctgcttgaagcaaactggccgcaggatgtaaggctatatgagggagaaaggaattttataaaaggccgttggtcgatcggaacaacaaaccgtaccgagactttgcccgatatggtcttgcatataactcagtctatgtcatagcctatcatgtattcatcgttgataagcagataatagtagccgttgccacaattcctgtattctttgctgaatccagccgccatatctccattttcgcgtggctcacaccataacgtaccgtcatagccacaaaagtcgaagcgtccggtggaaaacttttcgccttgcttcagtgccgttctgaaacgagccatatcccaactgccgcaatacttctcgatggtggcaagtccgatacacttgccgtcgatgcgtgtgccggtcgtgatgcggttctcgtagagggatttatccaaatcggcattagcgattttgcgaagccaatcattcgtatgcgtggcaagtcgggcaagtttctggtatttcaagacctgtttctttcctatgtccgctgcatcttcgggagaggatgacggatagtatatcttctcaatgcttgcccaatccgtgaagatgtacccgctttttcgttttcttggcgcaataatgccgatgacgttttcattgcggttgatgaataatcgcctacgttgtcctgcaatccttacatataaagaggtggaattctgctcgtttcggagataggcttctgccggatgaatagttgttgtttccatatttgtataaattttgatttttgctgttcctattttggtttacctgttcaaagttccgggattgtgccgttcttatatagaacaccgtcccgataatgggacacgatgcccggcttaagtcccatttcctcaaaggctatatgcctgatatagtccttgtattctttgccaatgaaattctttccacaaaggttgttgaaaatcatagggacggaaaaaccgtcttcgctcgataatatcactttgtcgtcttgtctaatttcttctaccatacttgtttacttttaattggttgaactatcatgctgatttttctttttccctgctttcgtttgccgtgcaggtttgttttcagctttttgaggcagccagaggatgaagctgtggcatcataagccaaacccggatagaaaaccgaccgtgtaacagtctgttttcgtcatccgaatgcaatgcggcttggcgattatgcgcttcgtcctacattcgccgacgaaaagagtaaagaatgacctgccggtaaaagcaaggattttgtaaaaaagaagagtcgtatatgatagaaaaaacggcttgggatgtgagaaaataccctgaaaaatttgcggtgtattgtattttatgtaattttgcagctgtatttcaaaattgcataaacagtatggagacaaaatatatccacagggagctatccgccgtgatagaagaggcttaccgctatttttcagtcattacggtaacaggaccgcgccagtccggaaagacgacgctgctccgcaacttgttctcacacctgccgtattactcgttggaaaatcttgatgtccggagtttcgccgaaaacgacccggtcgcttttctgaaccagcacacggagggcatgattctcgacgaggtacacaacgctccgaacctgctgtcgtatattcagggtatggtggacaatgatgccgaccggcggtttatcctttcgggcagttcgcagtttgccatgctgaaaaaggttacgcagtcgttggcaggacgtaccgccgttttcgagttgctccccctgtcatactccgaaatacgggagcaggtcaccgatacgcctcttgacaacctgctgtttaacgggttttaccctgccatttattcgggccgtaacatacccaaatttctttatccggcgtacatgaaaacctatttggacaaggacgtgcgcgacctgctacaaatcaaggacatgatgcagttccacacattcatcaggctttgcgccggacgtatcggatcgctgttcaaagcctctgaactggccaacgaaatcggtgtcagttcacataccgttacggcatggctgtccgtcttacaggcatcttatattgttttcctgctacctccctatttcgagaacacacgcaaacggctgactaaaactcccaagctctattttacggatacagggcttgcctgtcacctgctcggcatcgaatcgccggaacagcttgcacgggacaagatgcgtggggcgttgttcgagaacttcatcgtaacggaagccttgaagcggcggtataaccaaggcaaggaaagcaacctctatttttacagggattcgaaccagaacgaggtcgatttgctgttgaaaaaacattcggggctatacggtattgaaatcaagtcggcgatgacctaccatgcggacttcgagaaggcgttgaaacagatggacggctgggtcaaagaaaccatactgggtaaggcggtggcctatgcgggtacactcgaaaatactgctggagaaatcaaacttctgaattacagtcacctggacgaggtgttggcttaacagccctataacagtccagctaatgccgacacacactcctgctgcatggatttgatgtaatcgaagagaaccgagggattgatattcttgccatttagcttgcaggtgacgtgtaagtgctcgcctgtacttcgtccggtcgagccggtaataccgacggcatcgcggggacggactaccgtacccttggcggccagcacccgtgaaaggtggcaatagctgacggtgtaatttccgtgccgcagtgtcacatacttgccggacgtcttgtcctgtcccactttgacgaccaccccctccatcatggccaatacctgctcgccccgtgcgtgcaggtcgataccgccgtggaacttcctcttcccggtaaacgggtctttccggtagccgtatggcgatgtaattctgatgcgctgcaatggataagacacactgagataacggtcaatccacaacttcttactttcatcggcaggttttgtcgaagtctcctgtgcaggagccatgctttcgggtgtcggctccggctttttcataccctcctgcaaggcttctaccttgtatctttctggtgtcttggcaatcgtgttgaactgcgcctgaacgggcatcgtgcagaatgaaatacccgatattgctatcagtagaatttttctcattcggcaaagttataacgggaattttcatgtcggaaacaaactaccgtcatttcttgtattggtttgatattttgcgtctattagtacgattttgattagataattgtactaatgaagataaaaacagcatattacaaccatttatatagctgtatttttgtccgtcataataagatgtctctatctttgtatagtacaattttataatatgaatatagtatgaaaaaagttcagattgaatttgatgaattacccttttcgacactggaacgattcggtcttacaagggaaatgatcgaggacttgccgatgcgtgtgttggaagacatctgcaacggccggcattctcccgtgcttcccgtgcgtgtcactgacgagcatggcgggcaaatcgagagccgcagccgctttgcctttatccgcatggacgacggtcaggtggatgtggtgttctatccggcactgaaatcctctccactggagcggtatgacgaagcacagcagaaacagttgctcgacggcaaggcgattgtcgccgatgtggaaatgtcggacggacggagcagcaaggctttcgtacagattgacgccgagacgaaacaggtgatgtatgtccccacgcccatcatcgcacgcaacctgaaagtgctggccgaggtcatgcgcctcggtacggtggaggtaaacgggatgcagcacggcgagccgctgacggtagtcgtgggcggcgagcctgccacagtgggcatcgaccttcatgccaagaccggcatccgcatctgttcgggcgacgcgcagcaatggcgcaaccaacccaagcgagagtgggacaaatacaccttcgggtgctacggctgctgggtcatggacgatgacggtaaccttgattacgtttcggaggaagactacaccgaagagctgtggaacgaacagaagaagagcggcgagcgcaatcgtgcgacagctctccataagtaaaacatcaatccgtacattatggcacagaacgaatattatcccgaagacgtacttgtcgggaagatgcagagcggcgaatacggctggctcgattacgtcaatcatttctccgccgactggcaggaggaatacgcccgttactgcgaggaaaaagggcttgcagtcggcaacgaatccgccgccgagttcgtccgcttcaaggacgaacagttggaggcagcaatggaaagcggagacgcataacgaaaacaatcagactatggcgatacgaacgaataccaatccccggcagatggacttgcagcccgaaatgcgcgatatgctgatgcgcaacgggcttcaagcccatgttgcacttgacgatgcagggtatcggctgatcgtgcagggacatgactcgcccctgctggtctatccgatcaccgaacgtcagatgttggcactcacggactggggaacgaacactgccaacaagaaggcctacaacgtgctgacgagcatcgtgggcaaggacttctatatgcccaagaacttcgtccatgcccgtaatgccaacggtcgtgtggctatggggctgcacggctaccgcatcggcatcggcgagtacgggcgcatggggcgtatgggaatgcccccgccgttccttggctggacacctcgcaaccagtggggcttccacctgcgcagggtcggcggccaactgttctttccggggccgtccatcgtacccgaacgccccgacgggcgcatgaagcccggcgaactgcaatcaggcggttacggcttctattacaaggggcatcaacaggagcagcccgtacagcaacgggatgtgctgcaggacttgcaggcggctatcacgccgatggtcagccgtccacgcagcgaggaaccggcacgaccgtacaaggagcttatagcctctccggtctatttttccaacgagaaatgggcggagtgccttgcctcgcacggtcttgtcgtggatgtggaaaggcggacgctaaccgtgcagtcggaaagcgtccaagccgatatggtttatgacctgacggaagaggaagtgaggacactggttgccgcacccatcgaggaacaacccgtagaaaagcgtctggaactgctgaacggcattatcggggctgacttttccgacaaagtgacgatggaggctctcaacagcgatcagcgcatcgctatcggtctgcatcccgaagtacagcaggatttggaacaacgccagcggcaggagcaggaggctttcatgccggtggaaacctcgctgcaacagcaagaggaatccatacagggagatatcggtgcggcggtggacgggcgtgacctccagtttctgaatgaaaacaagggatggtatcgggaagagaaacacgggcgggaagtcgaagtgagccagatagccgttcaacctgcacagactgaggggaaatacaggatgaccgccgttatcgacggtcaggctatcagccatgagataacccaacgggactacgacaagttccttgcagtggatgactatcaccggatgaaacttttttccaagattttcagcgaagtggacatgaagacacgcccggaagcacaacggggtctcggcacgaaaatctttgccgccctcaccgcaggtacggtagtcgcggcgggtgtcgcgcacggcatccatcatcactgccatgccccggagttctacggcgagcgtttcggcggtccgccacgcccgtatttcaaaccgggtgtcgatacgccgagggatgtagccatccgttgtttcgaggcggaaatgaaccgtgaaatcaatgatatgagaatggggaggtaaaccatgagagagggcgaactgacttatgacgattttctgcgcaggctgaacattcaggacgtgcttatcgacgcgggctatcacctgaaccggcgcgacggcctgcgctatccctcgtatgtccggttggacagcgaggggcggcgcatccgcaacgataagttcattgtcacgcagcaagggaaatgctgtttcaaaccgcaacagcagaaatcgtataacatcatttcctttatcaaggagcatccgcattttttcgcggaataccgtgcaggcgtatctcccgaccgactggtaaaccttgtctgtaaccggttgctgaaccaacccgtcgctgaccgggatacccggattatccagcctaaacgggatgtgaagccgtttgacatggcggattacgacattcaccacttcaatccgcaggatcgggcgacacaaaagaagttctatccgttcttcaagcatcggggcatcgacctttacacgcagtatgcctttcatcggaacttctgtctggcgacgaaacaccgtgagaacggcatgaaatacaccaacctcgcctttccgctgaccgttccgaaagatacggaacaggttgtcggtctggaagagcgagggcgccctcgcatggatggcagcggcagttataaagggaaggcggaagggagcaattcgagccaagggctatggattgccagcccagccaaaactacgcttaccgaagccaagcatatctactggttcgagagtgcctacgacgcgatggcctattaccagcttcatcaggcaaacgacaaggatttgcggaaagcggtcttcgtatctaccggcggcaacccgacggtggaacagatgcggggtgtcctcacactcacgcttcctgccaagcaacacatctgtttcgataccgaccttgcgggaatcgagtttgccaagaacctgcaacaggagatgtaccgggctgtccgttccaccatcgaggagacaccggagcggaagccttatctggattccgtcgctgacggcaagaacctcgatgaaggtgacatagacctgctgcccgacgctttgcggtcgagctacgggaaatatgaatccgcatgggaagaagccatgtcgatgcgttcgagcggcctgtgccatccggacgacatacgagaacagacggatatcatgaacggaaattacaaggagttccgtgaaggattgcgggagttccttggtctggacaaggcgaatgacgccttttttgtccgtgaacagcctacctatcccaacaaggactggaacgaacagcttttggccgggcagaaacaggaagagacggtcgatgagacacaggcgagagaacagtcaccggaagaggaacaacaaacatactttcgccgatgatgaccgatgcacccacaggacatttccaaagtatcgtgctgcaaccgcacgccggacagttcgtcatcgacgagctgccagcaatcgtattgtgctgtgcagcatgggtgtacggtggcatggagggactgcctctgacagctcttgccgtaccggttgccgcattactttctttggcattactgtaccgtttcatctatctgcgccggacacgctaccacatcggcagcgagcagcttatcagccggcatggggtgttgtcccggaagacggactacatggaacaatatcgtatcgtggactttgtggaacaccaaagcctcatgcaacagctttgcggcctaaagacggtacgcatcttctcgatggacaggaatacaccccggcttgatttggtaggcatcagacacaacttcgatgtggtaacgcttatccgggaacgggtcgagtataacaaacgaaaaaagggaatatatgaaatcacgaatcattagtctggtcatttttgccctctgcctgatgccacactgggcaaaagcccaaatcacggcgtccaatccgttggaatggatggcgttggccgagggcaacgaggttgtcaatgaccaaatagagaaacagataaatggtcagacgaagacagctatgctgcagaacagcatcgccgccgagtttaaccgcatccacaaatgggagaagcagtacaacagttatcttaagacggtaagcggctacgcttcatcgctgaaagcctgcacccatctctacaacgacggcgtgagaatctttctcacgttagggaaattgggcaacgccatccgaaacaacccgcagggcatcatcgcctccatgagcatgaacaatctgtatatcgagacggcaacggaactggtatcggtcttcacgctcctgaatgacgcagtggccaagggcggcaaagagaatatgctcacgggtgcggaacgcagcaagaccttgtgggcgttgaacgacaaactttcggttttcagccggaagctgcacctgctctacctgagcatacggtactataccctcaatgacgtgtggaacaacgtgacggccgggatgctcgaccgcaacaacggagaggcggcacggatggccatgtcccgttggcgcagggctgccgtccttgcacgataaaatcaggtgaatgatgaaacggacgatttggataggcatcttattgctgtgcatcggtatcggcaaggttcgggcacagaacgaccccgtgcttgccgggatgatcctgctctataccgacaaggcggaaaaggagctgaagaaccaggagaaggtcatgctgatgcagaccaccggacacctgtggacgaaagaggaagtgaaagccacgaccgacctgcaacgggagttcaacaactatttggactctttccggtcgataatctgctacgcagcgcagatatacggtttttaccacgaaatatcaaggctgacggacaatatgggagactttaccagacaggtaagccgcaatagtcccaacgcgctggccgtcgccctctccacgcaacggaaccggatttaccgggaactgatcatgaacagcgtggagattgtgaatgacatccgcatggcgtgcctgtcagacaacaaaatgacggagaaggagcgcatggaaatcgtgttcggtatccgtccgaagctcaagatgatgaacaagaaactgcaacggctgaccaaggcggtgaaatacacgacgatgggcgacatctggcgtgaaatcgacgagggggcacgcccggcagccgacaaacgggatatcgtggaagccgccaaaagacgctggcggcagataggaagaaatgtaagaccttaaaaacagacaacgtatgggcgtttggagtacactattgaaatatagcggcaaggccgcaaaaggtgtcggtacggcaacggcggctaccggcaaaagtatggggaaagcggtgctgcacccttcgcagaccttgcgtggcgcgggtcaggccgtcaagacggcgaccatcggcggcgcggtcggttatgtgggctgggagaagctgaccaccgacaaaagcgtggtgcgtatcgtgagcgatgccgttgtgggcgaatccgtcacggataccattgcatgcacggcggacggcgtgcgtgaactgacgggcaaggcaggagaagccgtcagttcggtcagtggtgcggtaaccggcatcgacaacaaactgaacggcgtgtcgaactttttgcgacaagcctccggtggcggaggtcttgatatgttcggcaactttttccgcaaccttggcagcggcaacgtctccggattgagtattgccggactggttgcggcggcgttcctcatattcggacgcttcggctggctgggcaagattgccggcgcatttctcggcatgatgctcatcggcaacaatgctggtgtcttccgcacgccggagacagaaaacgtgcaacgcacccgtacacctgacttttcggcaggggaacaggcacatggaggaatgagaagatagaatacgaatcaaaatggaaacagcatgaaatatacagaagaaatgatcctgcaatccgagagcggctattgtatgcctttcgaggaacagcagggcaaggacgtggagctgtcgctcggctacggcgaacagaccgacccggcgacgggcgagaaattctttcatcacggcatcgacttcaacgtgcggtgctatacgctttccgcccttgccagcggcatcgtgtcgggtgtgggcaatgatagcggacacggcatctgccagaccatccgctacggggagtatgaggtgacctacggaaacctgtccaatgtcttcgcccaattcggccagcgtgtgaaagccgggcagacggtggccctgagcggcgacaagctgcatatcgccgtgcgtttcaagggcgaggaactgaacccgctggagttcctgacgatgctgtacgggaacattcaggcgatgcgtcaagccggaggacatgaggcagactatttctccggtctgaaactgaaaaccgattacgaccgggacaagagggagattgaggaactgatgctgcgcttcctgccgcactatatggaggatctgcgacgtgggacatacaccttaccccggaatacggaacaatcgctacgccacatcttcacggtgggcgcgatgaaggagtatttctacgagaatatgccaagcatggccaatccgctcggactgggacacaaagccctgccactggcctgcaaggtgcagaacctccttattgcggatttcctgcattacctcgccttgcggcatgatgtgtacctctccactgcgggcagtgacataaaaaaaaactccatgacgaagccctgacctatggcggcatcatagacccgttggcggaactggacatcaacatacagagcttcgacataccgaggcttgtcacggtctatcccgaccgggcgggtgtgcgctggtggacgaaggcatggttcaacaaccgggaagagggcgagacatccgtcgaaatcgaacgggagcaggcaatacggttcatgcaggacaacatcgagaaggacgcatggctggaagagttctttccccggcagatggaggtttaccacaacgccatcgagcagacgaaagaacagttattgaaacagataaatatatagtacacaatatggatggaatcaaatatagccggcaattcgcggaaatagaacgtctcgtgaacgattatttccattgccatctcgctcccgtcatgtcgaaaacgcaggcttatctcacgaagaagcagggcgaggaaatgagggagtattccacctcattgggcggcatactcagcgcgatggcgtctgcggcacagccgatgggcgacccgtaccaggtactcaaggttacaggcgaatggaactcgaagacgacggaggactacatcgcaatgtgcaaggcagagattaccggctccaaggagatacagcaagacctcgcatacatggccggacagtggcgcgataccgtcgtgcgggaaatcgggcgtgagcggtatgacgaactgtcggaacaattgggcggtgatcttgcctacgcctatatggactaccgagtggaggaacagatgattgaccggctggtcaaggagcgaatgccgaaatcgtcagccgactacatcatccgcaaagctgccgaatcgagcctgctcggactttcgcaaaccttgaaccgctcgccgctggccgaggaaatcgaggcacggggtgaagccgcctaccgtccgaatggttgggaaaagggtgcaggacgggtgttaggagcaacggcggataccgtcatgatgggcggtgtgggttcgtgggcgacactggcaaagtttgtcggggcggacgtggctatctcggccgttgcctcacgcttcgagcctgaaaagtcgcccaagctctctgtggagcaatgtatcagtaaaggagtgttcggtagcgaacggaacgtgtttacggacttccgtaaggaggctgcaacagtacaggcgggtgatagtgcgcttattgtggcggccaacgagcagttgaagaaaaaaacacctgtgatgaactttaattttttggagtggatgcaggcaccaaagtttaccccttttcaaatgtccgaaatgctcggacaccatgaaaagaaaaatgaacgtgccgaacggtacaaggatgtgccgctcatcgtcgctcccggacaggaagaagcctatttgaagcatttggagaaatataagaatgcaacgactgtaactgccaaaaaggagtcaacacagccggaaatggaacagtgggaaaaagtggagaaagaggaacggcaggtggttattccacgtgaggaagaaaagcaagagagagaagctgtgcagaccaacacgaacggatggagcggattgctcggtacgttgggattagagggattgggcgatatcacgggcaacctcggatatgtcatggctatgctgcccgacatcctgttgggggcttttaccggcaagacacaatcgttgcgctttggggacaacctgctgccgatagcgagtattgtggccggtctgttcgtgcgtaacccgctgctgaagatgctccttgtcggtctgggcggcgcaaacctgctgaacaaggcgggacacgaggcgttggggcgacctatgccgtccgctgccgaatatacggacaaacagtaccgccgctattccgacgaaccgctcaatccccgtatcgtgaatccggtattgcaaggcagtacgctcatcgccacgatagaccgtatgccttgtaccatccagctcacgccgaccgtcgcggaggcttaccgtgcaggggcattgccactgaatacgctggcgaacgccgtgcttgccaagagcgaccagttgcgccatatcgcctcgcagaattacgacgacggacagcgggaaacgattgtgcgcacacggggcatccaataattccaggaataacaaaagcatgatgatatgaaagaaaagtcgcaaatcgaaaagaaggccgaagcaaggcaggcggaactgctgtccgccgcattgggcggggcatcgaacgccggcggccattggctcaacgtatcgggcaagggatttccccggctctatccgcaaggggtctcggccagcccattcaatgccctttttatggccttgcattcggacaataacggatgcaagaccaacctgttcacgctttacagtgaaaccaaggcacggggtgctgcggtgcgggagcatgagcagggcgtaccgttcctgttctataactggaacaagtatgtcaaccggaacaacccgaatgaaaccatcgaccgcaccgcctatctccaattggacgaagagcataaggcacagttcaagggtgtccacaaccgggagatccgcacgcttttcaatatcgaccagacgacgttgccctacgttgacaagccggcttacgaggatgcgataaagcaggacggcagtgttcaggaaagaggatatgccgaggcggacaaccgcaggttgcgcacccggttcaacgattttctgctgaagatgcgggacaacctcgttcccgtgcgctcggatggtagcggagttcctcattacgagacagacaaagatgcggtctatatgccgcgtcaaaaggattttgagcattaccacgattatgtgcaggaagccttgcggcagatcgtgagtgccacagggcatcaacagcggcttgcccgtgaaggcatggtcatgaagaatggcgtggctccgtcagaggatgcgataaaatatgaaaggttggtcgtggaactggcttcgggtatcaagatgctggaactgggactgcccgcgcgtctgtccgatgcaagcctgaagacggtggattactggtgtcgggagttcaaggaaaacccgtgtatgatggacgctctcgaaagcgacgtgaacaatgcgcttgatgttatccgaaaagcggaacggggcgagaaaattgagtacgccaccctgcgaaacagacggcagaccacgaccatgcaggaacagatgcccaagcattactttgtggcgaatgaaatccgccagcacccggacaaagcggcgaaaagcatcgtcctcgtcatagaccgggaggcaaaatcggcagatgtcattttgccggcaggagcttcgaccgaggcgaacaacgagattcccggcatgaacaagggacgtatcgaacgggcattgcagaaagaggctattgagcaggtgcgtttctataatactgacggtgcattgggctacagacccgatgacagctatttcaatgaaaaaatggtgacactggcccggttaagaaactacacgttggaaaagctctccacgctggacgtgtcggaggcggtcagacgggcgaatgaggtcgggttcgatgccgtgcagatgattcaggacgacaagaaccgttgggcactctatatcaagccggaaaacaaggaggggtacagcgtctatcccgataaggaggatgtgaaccgttttttctccacgctcaagcaggcgatggacaacatcgacaaggtacggatggagctggcgcacaagtattatgcactggcggaggtcaagcccgacctgaaagtggatttgttcggcagcgatacgccggagattgacctgaaccgtattcagcatgttgccatcttcaagaccaggcaggatggaatccagtgtgtggcaaccatcgacggacaaaagctgcagccccgcagcgtcactccacagcagtggcaacggatgtgggtggcggaagaccgggacggctacaagcggcatttggcggccacgctgtttgccgatgtgctgcaaaagggacaatccgtcggggaacagaaagcggaagagcaggtacagcaacagaatgagacggtggcggaaaatcggtcggaagagacgaatgatgaaaatatgtctccgaaacggcagttttgggacaacctcaaggaaaagcatcccgacgccctgtatctgattcgtgcaggagaagtgtaccggctttataatgaggatgcggcaaagggagctgatatattggggattacgatgaagaaatatccggaacgtggattttcgactttcgcagagttcccaaggacgcaactggacagctatctgcccaaacttgtccgtgccggtgagcgtatcgccatcagtgagatagagctacaggataaacggcaggacgagcaggaaacacataggggtattcatagataaggagtgacgattatgatcaagaatcaagaatatgcacaacagtacgcggagtatgcgatggaacagatgcgaaggtatggcattccggcttccgtcacattggcgcaaggcatactggaaagcagcaacggacagagccgtctggcgaggaacgagaacaaccatttcggcatcaaggcgacaccctcgtggattgccggaggcggcaaatacggaatctacaccgatgataagccgaatgaaaagttctgcagttatgacagcgtgggtgattcatacgagcatcactcccgctttttgaaggagaacagccgctatgccggttgcttcaaactctccccggacgattacaagggctgggcacaaagcattgagaaagccggttacgccacaggcggcaagtatgccgagaacctgcaaaaaatcattgagcagaacggcttgcagcagtatgacaggcaggtgatgcaggagatggcggcacaaggcaggcagttcggggtggaacacaatccgctccagacttccgagagtgcggaacatggaacggggtattcgttcccggtggaacgggaggaatttctgttcattacctctccgttcggaacacggcaagacccgttggacggcacaaagcaacagatgcacaagggcgtggatatacgttgcaaaggcgatgcggtactggctacggagaacggcggtaaggtcgtggcggtaaaccagaacaagaatacgcccagcggcaagtcgctgacggtggaatatgcccggacggacggcagcaaggtacaatgtatctatatgcacctcaaggagatttccgtcaaggtcggcgatacggtacaggccggcggacggcttggcacatcaggcaatacgggaacacggacgactggggaacatctgcatttcggtgtgaagaatatctatgccgacgggacgaaacgggatatagaccctgcggcgtatctggctgaaatcgcacagaaaggacatatcaaattgcaaatgctgcacaacgggaatgacctgctcgccaaatacaaggcggcggaagataccgtgcctgaaaagaacctttcgccagacggatggatgaaaaaactcctttcgtcggaggatagcggtgtgggaatgtcgggatgcaacgacccgattgtggagatggcgatgaccgctttcgcctccctgatgctgctggccacacagattgacaaccggaacgaagaggaacagaaggcgatgatatccgccgcgatggatcttcgtaccatcgacctgaagccgttgttgccgaatatgaagaactgcgacctgactatcggcgagaacggcaaggccattctgaaagcggacaacggggaactgcgtgtctcgcgggagttgaccgcttccgagctgaaccggttgtctgccacgttgaacaacggtacactcacggaagaggccaaacagatacgtgtaaccggtatgctgaatacggttatcctgtcggaagcagcctcacagaatttcgagcaagggatgtcccggcaacagggacaaacggaaaacctgcgaagataaaggcatggtgatatgataaaatgcgtgatgatacagctatgcaagtgtctggcgggagtttccctccttgcgttgcacctccggttctgctacctactgttgggatggatcgggacgctcgttgtcgtgggcgtgcaattagccatcgccggatggatggtctgggcgatgatacgcgcacccgactgaccgcaccctacaacagttcaacatcaatcaacccatgtatcacttgtccggatgatccatgtatcattaaagacaaaaaacagatgattaaatgtaatgttacggtatgcggcgttatcggccgcgatgcgtcggttcgcaagaacaaagaagagaaagaatttctggtgtttccgctccgggtacagattccggcgacgggtggcgggtacactatcgaggtggatgtccgcaaggagggctgtcaggaggaagccgccggttatcggaacggctcccgtgtagaagtgaggggtacgatgtatctcaaacgccggggcgacaagctatatttcaacctgttcgccgatgaaatctgcaatgccgctacggatgatgcggattgcgtcaagggcgagctggtgtttcgtggtaaggtcggccagaacatcgaggaaaaaagggataagaaagaccagccttatacggtgttctcggcgtttagcgcagagaaggtcgatgacggcttcgagtaccagtgggtgcgcttcttctgtttcggtaaggagcgcgaagcgtggttgcagccgggtgtaaaggtggatgccaaaggtgaaatgaacctgtcggcacacaacgggaaaatcaacctttcctgcaaggtggaggaactgacgcaatatgtggcggattcgtctaactataatcaataagggttatggccggttacagaaagaagaatgccgacggaccgaacagcgaggacaaggctcttgacctgttcgccgaaatgatgatattatgttgagttcaacataagatcattaatgtctgacatagaattatgttgggcattagtctaaacaattaataatcaatcgttctttgacattttgcacaacataattctatctttggagggattagagactatctaagaaggtcattaactccttatcctctgaccattttcgtgatggtgcatcagaaacggactgctcacattttttgagagcttctaatttcctctccatgctaatttcggcgtagatgttagttgtatcaatcgagctatgtcccatccaatttctaaccatatcaatatccgttccagaattaagtagatgagtggcggttgtatggcgtataacatgaggagatgggcgttttttagcaagagatggatgatttaagattacatcttgtgagtatttctttatcatttcataaatacagaatcgactcataggctgattgaatcggttaagaaaaaggtaatcgtcaggcaacttgttgtctataaatggcttgagtaaatcccagaaatcctcccatagaggacaatttctctctttacgccccttgccatgtaatgtcaccattggcattccacgttttgaaggcatcgcaacatccttcactttaacaccaataacttcagacactcgggcgccagtattatacatgaataagataatgacatgatcccgatttcttatcccttgatatttacatgttttcaatggtgcagcagccaaggcttcgatttcagatttgtccatataggttatcatgcgtttttctgttttctttgaagggataagattgacattgtgacaccaatctatatgttcaggagatttccacgccagaaactttgcgaaagcctttattgcagctaaacgattatttcttgaagaaacggtaatttttctctcaaattccagataatcaagaaattttgtaataacgtcagtcgtaatatccgagattttgagattatctattgcaatacttgttaatgtcgagacatacgataccaacatgcggaatgtatcacgataactcatctgagtgttacgactaaggttgcgagtgacaattaagtactctacgaggaatggtcttagccaatagccaagatgttctgtttcagcaatttttctatttttcattattcgtgtttttataagcataaaacaatttgtttgcttcctgcaataaagttggcgtctttgttagatagacggaagtgaaggacacgttaagatgccccaaataggtagacaacttcggcagtaaatcctgtacgttctttcctgatttataccagttagtaaggacgttgaccgcaaaagtatggcgaagatcatggattctaggctgatggcgtcctctatcagggaaataaagacctgcattcttacgaatggttgcaaatatctgatgtagagataccaaattaactggttttcctttcagatttatgaaaacgtatgactcctcttccattgggtacatttgagtccttcgccattgtaatatatcttgtatcaatcttgagacttgttcgttgaaagttaccaagcgtgacttgtagaacttactacaatgtatatgcacgtacatattatccatatcaatatcctcaatttttaaggataaggtctcacttattctgagtccaagcacatacgtgatcatcaagatatatcgtatacatattggctcattaacaagtggtctatatttgcgatatgtaagcgcacaatcaaatagtctcttcagttcgtcatccgtatatatgtaagcgggataatactctggagctttaggtagaaaaacgggaataggtatgttttgaatgagtcctctggaaaaagcccactcgaaaagtttcttcagaatgcagtgctgagaatgccaatatctggtgatgacatttccttttctgtaaaggaaggcattactatcactttccgttattgaagttaattctgttgtttctccaatgaacttagcaaatagtctcaaagagtaggttgtactctgatccttgcgaccaatagacgtacgaaacttgataaatgactcaacggtttcttttatactcatagaaactccccccagtttatatttgaaacatctctaagtgaattgagatccacttttgcatatactcttgtcgcttccatacttttgtgacctagtaaatcaccgacttcctttaaggtttgtcctttgtttatcaagaaagttgcatggctgtggcgtaaacaatggggtcccttgtgcctaacttccatttcactggatttcaaatacctatatacgacggaagctatggctgtacaagatataggacgtattggggctggtgtacaaaagaacaagttgtcgcttcctatgtcatttggccttccctgttttaggtaagcgataatagcttctcctacattatgtagaagtggtaatacttgtggtcgacaattctttgcatgcttaatataaatttgttctttacgccaattgatgtcgctaaccttcaagttcgcaacctcactacaacgtaaaccgtacatcgcaagtaacataaaaatagcatagtcgcgcgatgcggatttacctgtttgttcttttacggtttgtaacagtttttgaactttatcccacggcaagaaagaagggagattttcttcactgtatactttgggagtgattaaagctttgtctaggtcggcaacacaccaccccttttcgactgcataacgtagatatacacggacacaacacaggtactctttcagtgtattacgttgaaccttgttaaccgtgtagtattcaatgtatttatctatatcttccattgttaaagggtatgcctggttctccttttctattatcttgtaaaaataagtgagtatcctcaaatccgcaactacgcgcctaatatgatacagaagcgaaaagaatctgcatcgttagtaaaaagggggcacagtgcatcgaatgtcaccataaagacatataaatgccccttaccccaccatgcgacttgaggcaatacgcaaaatcacgactataagttgtcggtgttatccaaagtcattctggaacacattggcataagcattgttgcatgaatagatattcagcacatacttccttgatgtcctgacccatttggctggcacagagatgaacttaaagacaaacgtcttgatgcggcttgttgctttgagtccgaacctcttcacgtcaagcctcgccatgatgaatttatagaagttgcgtatgagtgccataagcagaagaaacaccgtgttttctcccataaaggattttggaagcctgttccagccgaatccgttattcatatcatcgaagatgcgttccttccctccacggaggttatagaattcgacaatctctttctcggaagactcgtagtcatttgtaaggatgcagcggtaggtgtattctccttcccacaggtcgagttcgccgtctatccgcttctgtctttgaatcacaagacggtatgccttccctttccatttctcgatgagaatggaggccagctcaaactcaatgccgcccaattccactttcttccaacctctgagggcaaagatgtcattgtagagcgaactgcatcggttagcacggatatagaaggtcttgcagtgtttagcaatctcttccactatctcttcagaacacgagccgcaatcagctctgaaacggttgataataagcttgttttgttcaaacctttcaaagaacctcttcagcgtgtccttctggtggaaacggacatttgtgttgccgtcgctgttctcaatgccgacaatcaagttgccaataaccgccacgccagggcgataaccaaggaacttcttgtatgtaggcttcgcatcaaacttctcagcctctatgaactggtggtcgaagtcaacgtcatacccctcgccctctttcagctgccctgtggacaataggcaattgaggagcagtgtattcagcttgtctgccgtgttgaagtcgtaggtcttgccagtgtcggatgtgtaggaaatgttatcctgggtcagttcctttatggctctaagaatcgtgtcggcactgcatgtgcgaagtgtcggatgaagcgaaaggtggtacatcagatgagtggtgacatcctcgatgcatgagccgccacaaaaataaacgctcataagcgaacggatgatttcgctgtattgataaccatacagcctgcatctcataccgagggttgagtcgattacagatgagagtctggagtcaaattgctccattattgaaaatattcctccaaaaggagtgagtttctcggatttaattgctacctttgccatgtctgtcgggtttgatacatattttgatttgcaacactaagataggtgaaaaatctgacatggcaaattcctgagcaactttttgttgctcaggtacttaaaaagttatatttgtaatagtgttgcggaattaaggagtatatctttccttcccttgatataggcatgagaatatctcctgtatgctaagtgattaaggtattcatttatgcgcattcctgatattgaaggagattctgattctggtagcatatgtagctctttaagccacatatttgcaaaataggtgaagaaactgtaattagacttggtaccttttttcttgtgagaacctttgtcttccaggttttgccatttttttgctgcatttgagatttcctcattggtaacagtacggaagttctctaaattaagatactctattagatgaagttggtactgtgcataaagctgaagtgtctttcttttaaaaccttttgatttgcaatccatcaagaaagacattctctcattataaaagggagcagcaatcagtctgactttgtgccatttgcgttctgcgagataattgaccatttcatcttgataacgaaaatctaaaaggcctacgtattgtaagaaatcaaccgccatctcaataaatttgattcgcgaggaagggcaatcatgatgtttccgagaatgataatgaccagaaatgggtgaagaccatagacgtgctgcttcaacgacatcatcaagagatacaattctcttttttccatcatgaagatcgaaatattggataaacttgagcgaatacccagcccaacccaatagtgttagccgggacaacccttccttacttttcatagtcagaaaggattctcgctcctttaataatggtgcagccaaatgttttttaaggaatggcttgcggataataatttgttctaacatgctcttataattatgtgagtaatacaatataatataacgagcatctataattatgttgtgcaaaactcgacaagaactctaattatcaagtaaatatgaaagaaactgacataaataaatgggtaacattaatgatcgagaaaatcgagggcattcaaaaggactggaaaaagccttggtttacggagggtacgctacagtggccccgcaaccttcacgggcgcgagtacaacgggatgaatgcttttatgctgcttttgcactgcgagaaagaagggtacaagattccccgtttctgcacgttcgattgtgttcagaagctcaataagcccggaaaggatggagaggaactgccgcgtgtctccgtgcttcgtggtgaaaaatcctttccggtcatgctcaccacgttcacttgtatccataaggagactaaggagaaaatcaagtatgacgattacaagaaactctccgatgacgaaaaggaacaatacaatgtctatccgaagatgcaggtgttccgggtcttcaatgtcgcgcagactaacttgcaggaagcgagaccggagctgtggcaaaaactggagcgagaaaattcgcgtccggcaatcgaggagggcgagcatttcagttttgccccagtcgatacgatgataagggataacctgtggatttgtccgattacgccgaaatatcagaatgacgcctactattccatcacgaagaacgaaatcatcgtacccgaaaaggagcagttcaaatcgggagaatcgttctacgggacactgttccacgagatgacgcactccaccggagcggaaaacgtacttgacaggttcaagccgacaactttcggttctcctgaatatgcccgtgaggaactggtggcagagttaggcagcgcactggtcgcacagcgttacggcatgaccaagcatatcaaggaggacagttgcgcatacctcaaaggatggctcgatgagctgaaggaatcgccgcaattcatcaagacaacgcttttggacgtgaaaagggcaacctcgataattacccagaaggtggataagatagcgcaagaactggaacaaaatgtcggcgagaagcaggaaaacggagcggcagcaaaggagaagacattttattcttctgttgcgtatctccaattttcggatgacacgagacagcttgacgaacttagggacaaaggcgattatgagggattgctgacgcttgccaaggagtattacgatggcaacggaatcaacgaaaaatatacttatccgtcggctacgaacaacaagggtgacagccttattgtcgatgacaagaatttcgctgtcgtgtataacgggagtgtcgggggtacttatgaggtgatgttgaaattcacggagcaggaaatccgagaccatatccggcgttacggtgtcgatattgccggagatacaataaaaggggttgccagggagatggcggcggaacagttctccgctttggcgtatcaaaagattccggccttcgagatgccgaacggtgaagtgctatatgtcgaatataacaaggaatccgatacgcttgatgtcgggcaacccaccaatgccgggctggtcgcgcagcatcgtttcccttacgaccacaatgtcgggctggatgccaatctgcaaaccgtgaacgagaagctgaacgagctggaagagtatcgggcagaactacaagaggcagaatacggcagcggtatgcgccggtaaggatggaaagaaaaagatgcggaactggttggctccgcatcttttttgcagtttatttccccaacaaaccgtctatcatagactgtaaatttgctatgtcgcaatactggttacatccccctcggtagtcctttccattttgagctgtccgtatcagaaacgaatcgagttcaattcttacgccgctgcccattcgtgacagaccggaagagtggctgatgtaaacgaacttgccgttgcgctcaatgaagcaggaggtgtcataatgcccttttgaattggaagccacctttgcaccaacggctgcggcatatttggaaatctcacgcaccaatgctgtctggaaactgcggtactcttttgaaacatagtctcctgcatctgcaagtatagcgtcctgccatttggtataaaaattctgtgccatattgatatttattattattcgttccgcaaataacttttccatttctcgccgtcaatggtcagtttgcccatttcccaatcgtattccacttccggtatattggtataagggaaatgaacggtgtagcctatctgtccgtaagagcaatgcagaggggtaacgcaaatctcccaaccgaagtaagattgcggcgtgcagtattttcgccagttgaaacgacctgcggcaatattgccgcaaagtcgtttgagtatgtcgtttgttgtcattctgtacctcctttgctgagtatggtgagttgttcgggacggtctggaaaccaataagcatcactgtcgatatatacgcatctatagccattccaaggttttctgaaagctaatacttctttggggccaaataccaccccgtagtcgtttgtaaacgccaccatatcgcctacagccaaatcactgtctgtttccatgacttcggacaaccggctgaaaaactccatgccctcggcttcacgctctttcttccagcgcataaactcctctttgtggcttcttgatgagccaataggtaataactccgatgccaaaacctctgtctcggaagagcttgttgagattaagatgatgctgtcactatccactttttcgggagttgagataattcgacattctatatcattatcggcagtgtgccaaaaaaggaggttgccttgcttgatgaaatcgtacttgctcattgtcttttgatttattgttttttttatttcccttttcttgaagccttttgacttcgcccaaaggggttgttttcatgtgcgtcacaaacgggggatgcaagaacgatgagcaaggaacctgcaatgaaattttatgaaataccgtcatctccgattacggaaagttgtcgtcaaattttatttcaggtagcgatagcggtacttgggcaatgttcgtccaccgtacctttgcacacgaaaacagacctgcggcgtatgtcggggctgtgaagggattatacccttaaaacaggaatataccggctgtgaaaccggtggcggaagctctgcagagcatatttataaaagtaaccggggagcctgtgcaaaaaagagagcaaccacccacttttgaggcgggtggttgccaatgtttcggacaaacatcagaagtggtaatcaacaactcctccgatgtagagtatcgttcccggttcaagcctacaaacaaactccataaacgtaaaggactgttcggcaaaagactggcagccatcgccatccaaatagaaatgataggcgacatccaacggattttccactgcctgtttgagataataggtcgaaccccattccaacatattatctgccgtaagagcattcgctctttttttgatattggcgacatactcctctttccattgctctattccaccattatagcgcatggtgtcatcggatataagctcgaacattcctttgggcaaggcatgattgaccaaattggcaatatcctctttacggtcttcctcgtctatttctgaacaatagtcatagaagctcccgtctccttgctggagtgtgtcctcattcagatagttttctttgtctatcggctccgttgaaatttgaaaaatcctgctgtgcataattgtaaattttagattgttaaatattttcttttttcccttttcttgaaactcttttggcttctcgtcggggaatgatttttatgcaggactgacagcgggaaaaggacggataaggcaagtaaacagtgtacgggatgaaacggaatacccaaccgccaaatgtaagagcacagtcaggctcgtccgactatgccctgcaacgaggtggggagtgaaagtcaatcttcgatttgtggaaggctgccgtgaagaatatccgggaaccgttagtgaaagcgatacttgacgaccagacgcacgctgtacctttgcatataaaatctctccgaagagaattgccgacgtgagatgaaaagagaccataattgagaaacgctattattcataaggggaaaagactattcgtggttgttataaatgcttgactaacatgaaaatacaattcgcgccataaaataatcctttcttgaaataaaaatcacagaaaaagaaacaagattaaaaaataaccattaactttgcaccagtcaagtttccaatcgaagcgtcgaacggaattaaaagggaatcccggtgaaaatccggagctgtactcgcagctgtaagtcctattaaagtttatcgcactctttgccactggtgaaagctgggaaggcgcgataagcgggatgagccagaagacctgcttgatgagatagatttagtgaccacgggataattgggggtcaacgtaacaatctgaggtattttatatttaagcatataatttagcaagtctatataagaaaaaagctctatctcttactcctctgaactgtgctctaaatgctttgattttagcattgaatgactctgctgcggcattggttgccctcctttcaaaaaaattgattatattcagataatgtgtttgtatagaacgtgcgacccttccaaaggtgaggaaccctgatttatctacttcatcataccaccttgccagccttgtcaaagcaatatccttaaacttacactgatgatagattaagcctaaccgcatagacagataatatcctttctttatatcgggatattccttgaaaagaatttcagctcgtattctttgagactgagtccataaggattccttcttgtaaagcagataaatgcttctcgctaacaactgctttcttgtatctccattagcgaaaacaggtgcatgatacatctttccacaggcctttgcataagcaatctgagtggactcttcatccaaagcctcccagcgagcttttacacgcatctcctgcaccgcttcataagctaacttctgtacgtgaaagcgatcggtaacacgtttggccgcaggaaagcagatgcgggcaatctgctccatgttaggagccatatccaaagtaatctcgcgcacttggtaacggcggagacgggatagcttaagcaggacagaagtgaccgtatgaacgtccgtacctttaatgatagcaatcatactacctttaccaccgtgagcttctttattgatcagtacagtatagagttctccacgcgagagggctacctcatcaatacagatataagcaccgatattcttttcgaatagtagccaatcctctgcatgaacaagttggtcccaatggagataaccacttagatggttacggtattgacgctccaataaatctccgtcaactccatataaaacacctaagagcttacaactgatcggatagctatcaatatagttcttttaaaaaagacgcaaaatcttgcgtcatacgagtaccttcagccaccatacgccagttacgagagatatactcattatgcttctttaagatccagcgacgacgacgaatattaaggaagaccttcttgccacgaagaggaaaatcctgaacaataacaggatcataaaagcctttactctcagtatcctgatctgcatacttctcaggaacgatatttttttcctcaaggtagatcacaacttcatttacgctttccttcacatcaacaagagcaaagtactctaaagtgccttcaggaagaagaaggcgataaccgtttaactccataagctatgaatttggagacaaagataataatttataaatttacccctcaggtttttacattgacccataattggcattagattaaaatgaacagaggctcgtccacaggcacctatattctttttgataaccgatttctcattcgttgcaaatctgtcgcaataaaaacgaatgtgtgtttaaactttttgtttaacttttaataattaagttatgaaaaagaattttagattcttggcaatggctgttgtagcaatggccgccgcagtgttcacgggatgttcatccgacgatgacttccttgctccgtatgaggagagtgcgattcaaacccgcgcgataagttctaccaatgcgcttatcgattttgataacgtaccttccagcgtaatggcttctgaccagtatggaaacaatctctattctgccacggccaacggtaagcaggtaacgaccggctacatcactcaaatcgggcaaaccggtacgtacattcagttcccgattaactatttggaacaagaatgggtaagcggacagccttgggaatatgaattttggaatggtggttttgccatctctaatttccataatctgacacagggggattatcaaaaccaatgtagcgtgtactggcccaacggcggtcatagcggtaaaaattttgctgtagctttcggttatagcgattcatacaatgattcacaagcaacctatgacaaatgtgcgaagatttacctgaccgatgcaaccggctacagagtcgttaccacaaacactcctgtcaagggtacaccgaaatatggtaaattcaacagcgtatgggtttgcaatacgacttatacctacatagtcatgaaggatggaaactcgtttacacaaggctctttgtcggcacaaaaaggatggtttaaggtggtatttgttgcgttggatgcgacgggtaaacctacaggtaaggaagtagaatactatttggcaaacttcgattccagtaaagatgcagaatcaggtttgaccaataaaatccgtactggatggaatcaagtggatttaagcggtttaggtgacagcgtatgtactgtagctatcaatttcgaaggaagcgattcaagcgcatacggattgaacactcctgcttacgttgctatagacgatattgatgtaaccgtaaacgaataacatgaatttggggcaaatgctttttaacggcaagtgcaaagtatttgcccctttttattatatcccaatgaagattgaaatcaaatactttcttcaagggaatttcagcgttaaaattataaatataatgaagaagtatttgcttttattctccttgacgatatttctatttgcttgcaacaaagacgaagaaatatcgcaggacgtgatattgcctcctgtcattgagttggatagcgaggacggaatctacgttgtaaagataggaaaagaggtcgttattgagccgacctatcagaatgtcgattacgccgtttattcatggaaatgcaacggtcgtatcatttccgatgagcctcaattgaaatacattttcaacgaatgcggttcgtattacgttaccctgcgtgtggatacgagggatgccagcacagaggaagaaattcgtgtggatgtcaatgaattggctccgcccgtcatttcattggtaaccccctctatagggcttaaagttgtcgcaggacgtgaatacatccttactcccgacattcaaaatgcagaaggagccacttatttgtggactcttaacggaaacgaagtcggaacggaaaatacttatacattcaagcaagatgagttgggaacttatgaactgaccttaaccgtaacaaatgaagacggacaatcagagaagacagtttctattgaggttgtcgataaacttccaattgaaatcgtagttccgtcatctttatatttcaccgaggataataccaaatacgtagaattaggacgtactttgtttgtccgcccctttgtgtcaataagtgccgagccttcttatcaatggagtttggacgggcaaccgattgaaggagccaattctttggtttacggtttcaaaccttctaaaatcggagagcatacgcttacttttaccgtgaaatacgataatcaaagaacaaaagcaatcctcactcgtaatattgctgtttccggtgtcgatgaagtcagtgtcaatattccggtgaaatgttgtgaagcggccgggaaaagaccttttgctgccggaaattccatttacagcaataaagtatatgaatttgttccggctccgggacaatttgtaaacgaaacgaatacagcaggtttcaatggggaaagcacgcacgaagcagcctgtgcttacgcacaaaaacgtcttgataatgaacaatatgtttctctcggaggttggggaggatatattgtagtaggattcgaccacagtatcgaaaacaaaggcggttatgatttttccatcaaaggaaatgcctttgattcgtcaaatgaaccgggcattgtatgggtaatgcaagatgtcaatggagacggcttgcccaacgatgaatggtatgaactgaagggttctgaatatggaaaacccgaaaccattcaggactatgccgtaacttatttccgtcccggtcccaacatggatactcaatggcaggacaacaagggaaataaaggggcaattgaccgtctcggcaactatcacccgcaagagttttattatcctttgtggattgaagaggattcctatacgttatacggcacatgcctgaaagcacgtaccgaacaaagcccgtcgacaggcatgtggtccaataatccgttcgggtggggatatgccgataatattggtgatgatatgcccaataaagacaatcctaacgcgggagcacttggaaactattttaagatttccgatgcgctcaatatcgacggcacgtctgcaaacctttcccatatcgactttatcaaggtgcagaccggagtcaatgtaaaagccggatggttaggggaaaattccacggaagttttcaagttctgtgatgaaaacaacaataacgacaaataaaattcattatgaacaaaatatatcatttcatcctattctgtttcgctacgctctgccttgctgcatgtagtgatgacgaccctgaagtaagcggaatagacggcaaggatcacttcatctccgagtttgctctaactgtagatggcattacctatcaagccatgatagtcggggacaagattacaattgagataccttataatgccagtctgaaaggggctaccgtagagtatgccctttgcgagggagcctctattaacccgaatccatcgaccattgaggattgggagaatgaatggaaattcgtagttacctccaaaatgcaggatagcaaagtatattcctatacttatcaatatgcagacatcgaacagagcggcagcgtggtacttgccacgcaatccgaggtggataattttgccaagacaggaataaacaaaatcgaaggcagcctgaccatcggaacggcagacggagaagaaatcaccaatctggacggacttgccaacctgaaacaaatcagtaactctcttgttatcaatccgtcttacaaaggagcggatttgacggggttggataatctggaacaactcggaagtttcaaattaggatcgacaacttctaccagtaaaaacataacgctcaaaacggttaatctgccctctttgcttggagtgaccggcgattttgtcgttaacagttctgtcattgaaaaaatatctatacccaaagtcgagttcattggtgaggatatgtatataacttccgatgctttacttgatttggatgcaaatgccgttgaatctgtcggagcttccttaattgtcaaaggttcggtagcgcaaaaagaatcagcgacaaccgaagccattgttttctcagcactaaaacagatcgggaatgaacttacaatccaatattttcccaaactgcaaggaatttatctaccggcattggaaagcgtggtcggtactgcttcattctccgatatgtcctccatcggaagtcttgcaatgaccgaattacattcggttggaggactgactataaaaaattgcaaagagatttccattgttgaacttcccggtcttatttcctgcggagagaccagtgtggatgcgaatacagtcaataagctaaatttagcttctttgaaagatgtattcggagatatgactttaagtaatctgctcatagaagagctggatttgtcccagacaaattttaacgggaatacacttaccctacaatgtgcccaactaaataaaatagtaggaccggaaacatttaacggtagccttcttctatgtcctacaaattgtcgattgactgaattcacgttggaaggaatctcaaatatacagggtgacttccaatgcataaattatttttatgtaaaagaatttgttatgccatttattcgtgtggcaggagatatgactattgcattgaattcgggaagtgttaatacgggggcggagatcgaatttcctaaattgcaggaaattggagggaccttaacattaggaacaaataggaatgcaaataatattaccttcccgttattgaaaaaaattctcggttcatgttcagttacgacttacaaacttaagaatgatattgagtttaccaatctggaaagcattggaacggatggagctgatgcacaaattaagtttgagattgaggctactaatattctatgtcccaaattaaaaacgataaatgggaagtttgatattgcaacatcttcttttatgtttgatatggaagtaaataaagtatcttatcctaacgtagaatcaatatccgaaaatctttcaataacatgcccgtattctgattttggttctaatggtattttgtccattgatttttcaggtctcaaatcagcaaaagggattagtataagcgggcaaggagatgttactgatttcagttctttcaaatacctgtttgaaaacaatgttctaacaggagaatctcaatggtctgtcaaagaatgtggttacaaccccactttccaagagatgaaagacgggaagtacaagcttgccgaatagataacgaaacaataaattttctgccaatcctcggtatgcttaccgtaaggtaagctgccggggattaactataaaaataacggtatgacctatcaccaattgaaatatctgctatggagcgtagttgtcggagtgacactatccttgacatcctgcatgaagtgggactacggcgatgccgtggaagatttcaacgccacgggagccggactgttcatcaccaacgagggcaacttccagtacggcaacgctaccttgtcctattacgatccggcgaccaaacaggtgcagaacgaaattttcttccgtgccaacggcatgaaactcggcgacgtggcacagtcgatgaccatctacgacaacaagggctgggtcgtggtgaacaactcccacgtgattttcgccatcgacctgaacaccttcaaggaggtaggacgcatcgagaacctgacctcaccgcgctacatccatttcctaagcgacgaaaaagcatacgtcacccaattgtgggacaaccgcatcttcatcatcaacccgaagaaatacgaaattaccggctatattcaagtgccggacatgacgatggaaagcggctcgacggagcaaatggtgcagtacggcaaatacgtctattgcaactgctggagttaccagaaccgcatcatcaaaatcgacaccgaaaccgatcaagtagtcgatgaactgaaggtcggcatacaaccaacatcgctggtcatggacaagtacaacaaaatgtggacggtgaccgacggcggttatgagggcagcccctacggttacgaagccccgtcgctctaccgcatcgatgccgagaccttcaccgtggagaagcagttcaagttcaagttgggcgactggccctcggaggtgcagctcaatggcgacagggacaaactctactggatcaacaaggccatttggagcatggacgtgacagccagccatgtgccggtacgtccgttcctcgaatacagcggcacgatttattacggactgacggtaaaccccgccaacggagaagtgtacatcgccgatgccatcgattaccagcagcagggcatgatataccgctactcgcccgaagggaaattgatagatgaattttatgtcgggattatccccggtgcattttgttggaaatgaagaataaattgcggcatatataccatattattttcatcacgaaaagacaggagatgacgattccaatgacaaccaaaggaatgattctcgatcagatggtacaaattttcacaaggaaaggctgtcatgtctatgcctgcaatgcttttctcaatcatgttcatatacttgtagagataccatctcccacggacttcgcaaagattatcaataaagtaaaaagttctacaggcgttgtctatcgaaaatattcggaatatgcggatttttcaggatgggcagccggatttgattcgtttagcgtgtcattcaatgatctgaatagggtaaaacaccacattgagaaacaagagacggttcatcaggaactttcattcgaggacgaatacgaccaactgcttgaagaaaacggattcaatgcctatcaagattttatgcgggcatcattctctgcatatgctgcggtaaataaccatattaaaaacaaaaggaaatgacatatacaaaatatttacttttctcaatattggttgtctgtccatccgtgctgtccgcgcagggaatcacccggcgtattcaccagatagacgaggtgaccgtatggggcaaacggccgatgaaggaaatcggcgtgcagaagacgaagttcgattcactcgcactgaaagaaaatatcgccctctcgatggcggacatcctgacgttcaactcgtccgtgtttgtcaagagctacggccgcgccacgctctcgaccgtcgccttccgaggcacgtcgcccagccatacgcaggtgacgtggaacgggatgcgcatcaacaaccccatgctcggcatgaccgacttctccaccattccgtcctacttcatcgaccaggcatcgctgctgcacggtacttcatcggtgaacgaaacgggcggtggactgggcggtctggtcaaactcggcacggctcctgaagtcgctgaagggttcaacgcccagtacgtgcagggcatcggctcgttcaagaccttcgatgagttcgcccgcttcacctacggaagtgagcggtggcacgtctccacccgtgcggtctattcttcctcgcctaacgattacaagtacaccaaccacgacaaaaagataaacatctacgacgaggataagaacatcgtcggacagtatcacccgaaagagcgcaaccgctccggggcgttcaaggacctgcatttgcttcaggaagtgtattacaataccgggaaaggcgaccgtttcgggctgaacgcctggtatatcaattccaatcgggaactcccgatgctgaccaccgattacggcgatgccaccgacttcgagaaccgccagcgagaacagacgttccgcagcgtcttgtcctgggatcacatgaaaagcaactggaaactcggcgtgaaaggcggttacatacacacatggatggcctacgactacaagcgtgaggtcgcacctgacaactgggcgtcgatgacccgctcccgcagcaaggtaaacacgttttacggtcaggcggagggagagtattctttggataaaaaatggtttttcaccgccaatgtatcggcacaccagcatttggtacggagcgaggacaagaacatcatcttgcaggacggtggcaaggccatcgtgggctatgacaaggggcgcgtggaactctccggctccgtatccgccaagtggcagccgatagaccgcttgggtatgtcggtggtactgcgagaagagatgtatggttccgattggattccactcattccggctttcttcattgacggtatcatttccccgaaaggaaatgtgatgctgaaagcatccatatcgcgtaactaccgtttcccaactctgaacgacctatactttttgccgggaggtaatcccaacctgaaaaacgaacaaggtttcagttatgatgccggggtgagttttgatgtcggcaagaaaggcatttacaagttgagcggcggtgcgaactggttcgactcctacatcgacgactggattatctggctgcccaccaccaagggcttcttctcgccccgcaacgtaaagaaggtccacgcctacggcgtcgaggtcaaagcgaacttcgccgtgcagccggcgaaagattggctcatcgacttgaacgggtcctattcgtggacaccctccatcaatgaaggtgagaagatgtcgcctgctgaccagtcagtgggcaagcagttaccctacgtaccgaagcactccgcatcgctgaccggacggttgtcgtggcggacttgggcgttcctttacaaatgggcgttctactcggaacgttacaccatgtcgagcaacgactatacgctgacaggacacctgcccgagtatttcatgagcaatgtctcgttggagaaaaacctgtttttcaaaccggtggacgtgcagttgaaattcgccgtcaacaacctcttcaacgaggactacctttcggtactctcgcgccccatgcccggcatcaacttcgaattcttcatcggcattaccccgaagttcgggaaaaacaagaaaaagtccgaaaatacaaatatgtaacgatatgaaagcattaaagaatttaagcctgctgttgctacttgtactggcattcacaggctgccacaataaaagttcaaaactcgccgatttcaaccgaacggtctatacacctgaatacgcttcggggtttgacataaaaggtgcagacggcaaaaagagcgtattggttatcgtcacgaacccttggcagggcgccgacagcatcattacgaacctgttcattgcccgtgatgacgaagaggttccggcggatttcaccggtcaggtgctcaaggggaatgccggacgcatcgtctgcatgtcctcgacccatatcgccatgcttgacgcaatcggtgaaacgggatgcgtagtcggcgtgtcaggcatcgactacatctccaatcccgacattcaggtacggcgggacagcatcggagatgtgggctacgaagggaatatcaactacgaattgttgctctcgctcgaccctgacctcgtgctgctctacggcgtgaacggggcaagctcgatggaaagcaagctcaaagaactggatattccgttcatgtatgtcggcgattacctcgaagagtctccgctgggcaaagccgaatggctggtggcactttcggaggtcatcggaaaacgggcggagggagagaaagtgtttgccgatattccggttcgctataacgctttgaaaaaacgagtaaccgatgcagccctcgatgcctcttcagtgatgctcaacacgccttacggcgacagctggttcatgccctcgaccgaaagctatgtcgcccggttaatcaaagatgccggaggcgattacatctacaagaagaacacaggaaacgcttccgcacccatcgacctcgaagaggcgtatctgctggcgtcgcaagccgatatgtggctgcatgtggggatggcgaacacgcttgatgaactgaaagccgcatgcccgaagttcatcgacacccgctgtttccgtagtggacaggtctataacaacaatgcccgcaccaatgctgctggcggcaacgactactatgagtcggcagtcgtaaatcccgacctcgtgttgcgagacctcgtgaagatattccaccccgaactggtcgaggaagatttcgtctattacaagcaactaaaatagatgcgctcccgttccgccatattgtttgccacgctggccgccctcacccttttcctgtttctgttggatttggcggtgggggcagtcgccgtaccgctcggcgatgtatgggcggccctgacgggtggcgattgtccgcgagcgacggcgaaaatcatactgaatatccgactgattaaggcggtggtcgcgttgctggccggagccgccctgtcggtcagcggtcttcagatgcagaccctcttccgcaatccccttgccgggccttacgtgctcggcatcagttcgggcgcgagcctcggcgtggcactcgtcgtgcttgcaggcgtcggttcgtcgataggcattgccggggcggcttggctcggagcggcgctcgtgctggtcgtcatcgccgccgtcggccaccgcatcaaggacatcatggtgattctgattctcggcatgatgttctcgtcgggagtcggcgcgattgtacagatattgcaatatctcagcaaggaagaatccctgaaagcctttgtcatttggacgatggggtcgctcggcgacgtgaccttcgaccagcttgcgatgctcatcccgtcgattatcgccggactgttgttggcagtggtgacgatcaagccactcaacttactgctgttcggcgaggaatatgccgtgacgatggggctgaacatccgacgctcgcgagggttgctgtttctctccacgacgctgctggccggcacagtgaccgccttctgcggtccgataggcttcatcggtctggccatgccccacgtcacgaggatgctgttccgcaacagtgaccatcgggtactcgtaccgggaaccgttctttcgggtgcggcggtgctgcttctttgcgacctcgtttctaaaatgttcaccctgccgatcaacgccatcaccgcattgctgggaatccccatcgtggtgtgggtggtcttgcgcaataaatccgtcacggcatgatagagttacacgatttttccataggctacggagagcacaccttgctctgcgaggtggaaaccaccatagaaaagggcaaactgacagcccttatcgggcgcaatggcacgggcaaatcgacactgctccgagccatcgccggactgaaccgccgttataccggccgaatcctgctcgacgggcataacgccgccgatatgcgagcagcagaaatggccagaacgctggcattcgtcacgaccgagcgcacacgcatcgccaatctcaaatgcaaggatgtcgtggctatcggccgcgcaccctataccaactggatcggaaagatgcaggaagccgacaaggagattgtcatgcggtcgctcgcctcggtgggcatggaggcttatgcggagcgtacgatggacaagatgtcggacggcgaatgccagcgcatcatgatcgcacgggcgttggcgcaggatacgtcgattatcctgctcgacgaacccacctcgtttctcgacatgcccaatcgctacgaattgtgtacgcttctggcacggctggcgcacgacgaagggaagtgcatcctgttctccacgcacgaactggatatagctctgtcgcttgccgatgcgatagcccttatcgacccaccccgtctgtcgtgcctgccgaccgaagagatgcgtcggagcggttgtatcgaacggttgttccgaaataatagcgtggcgttcgatactgcgacaggattcattaaagtgggacaatgactaaggaatatatcatagagaatttcacagcaaatatcagcgtggacgaatacatttcacgcttccgggacgaaaaacgttttgtcgaattttgcaaacaatgccccaactacggcaatagttggggatgccctccgtttgatttcgataccggagaatttctgcgccaatatgaatatgcccacctgatggccacgaaaataattccggtcgaaaaaaatattccgatagacagaacgcaggaattgattaaaccggaacggctcaggatagaaaggaaattgctggaaatggagcacagatacggaggtcgggcattcgcctatgtaggaaaatgcctatactgtcccgattccgaatgcgcccgcaaatgcaaccgtccttgcctgcatccggacaaagtacgtccctcgcttgaagcattcgggttcgatatgacacgaacactctcggaacttttcgggatagaactgctttggggaaagaatggtattctaccggaatatcttgtgattgtaagcggattatttcataactcgacagaaaatattatcagcgaagcgtaatcaggattcaggaatataatcttattactctcattgataacgtcatgacagccattcacaaaaaagtccctgcaatccggattatagattgagggacttgatgaaagttaatgtaaaaactaaaaaaataactccactttcgtatgcctgttggcttcgaccggcacatggtcggctatgccgcccctgcttgtcttgacgatgcgttcgatcggtatgccacgcttctccaattccgtaacaatataatcagttcttgatgcacttaatgaaccattaagcacgggagttccagtcgaactgtcggctgcgccggttactctcaaggataatccgtatttcttggccacgcgagccagttcatcaaggttaagcatttgggaagcatccgtcaggtgcgccgtattgaggttaaaaaagaaatagacaggcgacccgatgcaatttccggcttgtatgagttccgtcctttcagagacgattatacccggcttttcagcatcatctccgttgttgccatatccaatatttgccgaatcaagcggcgagattccatcccagtgccggtttcttaatcttgcccggagtgagttcagcccactataattattcatgggataaccttggcggctgtcggtctcatcgtcatcaacgagatggccatacttgtcaagcaaaccttctatttccagaattttcttcaattctgcgagcgcccgtcggttgtggtcgtgccagtctttataacgcttgttttctccggacaagacatcggcataatccacgagccactcattctgacgaatgtaaggcgtagcatccactgcacgtttccaaccgacctttccgaaatggaacgtgaatccggcggtcaacgatagcatgtggtcgccgaggcggttcgggcgtccgtaaccatcgaagtcctgaaaggtggtcgtgccggagagttccaatatggcacttacccgttgggaaatccgatattctccctgtacgccatacgaaacagcaaaagggttattcccgttagaggcgttgtgcaacaggccgacacctgcaaagggagcaagattccagcgtacctgttcttgccgggcatatctgcggccaaggacattccacagcagatccgcatggacatggtggtagtcctgattggacaatgtgccatctttgaactgcacaccgctgtaattgatacgtgcgccgacggacggagtgaaccattttccgactgcgaaactgtacgagggtttcaagcgtccgaagaggtcttcgcagccgagaggtgtgccgagaaaggcggacgtacccccggtaatgctgacaaaccagttgccagtccgggttgccggaagtaccactccatcaagatagacgggctgtatcggttgcagttcctccgagacattatagtacggtgtatgttgtacagtatccacctgtacgggttgtacacttgcctgtgcctgcaacgtgcaaagcacggccaatataataaagatttgtttcgtcatattccaatgatataattcgttatacttttgatttgtagtaaggcgtatgccacttaccgtttgggtttcttgccaatggccggacgcatcatgcggctcgccatcctcatgcagcggagtgcccatgcacggttgtcctcgtccttgtcgcgcccccatttcaggtcgctgccgccacctccgccgccacgagtttcggcaaaagtggtggcattatcgaccataccgagaaacagcatcgtcgcgcagtgcatcacgtccgtaccttgttccgctatggactggacgagcgagccgtcgaacagttgccgttccgccacgtccatctgtgccgatacgttcctatactcgccgaccacattttccagcaggacatccttgagcaacgtgtccactttggaatgtacatcatgggagtatttgtaggcttcctccttgagttccccggtacgttcctcaatggcatccatgttctctttcagctcggcaagctgacggtcagccgtctgtaacttctcctgcttatctgccagttgcctgttgattccggccagttctttttccagacttttcacttgtgcggctaattgttccgcatcgcccttgttcgctttcaaatcctgttcggctgccgatagtaggacctctttttcggctttcgacttctcaaggttatcgaccattgtcgtaagccccttgaccctgcgctctgccagacggatgtccgattggaggtcagccaaaactttttgatgacggctgatattttcctcgatggtcgtacattcttccgacaacatacggcggtattcttcggtcgtcctgtgccgtgctcctgtttcggatatgcttgttcccctcgacattccccaccttgtattgacttcggcgaaaaagtcggtatgaagctgtttcatccttgcgctgtattcaaacttgtccttaccggcaaatatttccttgtacgcaaagcgaccgtctttgattggcaggagcgtacagtggacgtgcgggttcaattcgtcaaggtgtacgatgaatgcggcgatgttctgttcaccatatttgccactcacaaatgaataaacatccttcgcccatcgttcgatatcgctttcccttttgatatgggtattgtccgcatctttctcgaaatccactttctgcgtgccgaatgcgagttcgtgcatccgttcacgggagccgccgaaaatgaagttcaccaccgtgcggtacttcggttctgccagtccttcgttggggtctttgattccacgcctctccaatatgtccgccatccgttcgggaatgctgcggcttgtatcaatggggcgcaccttgcctccgggcgcaatctcgaagttcaggtgtttgcgtgtgggatcgtaattccccttatccatagcatacttttccgccttttcactgcgattgcgcaaatgttcgttgctttgcgcggtggtaatacctttcgacacccgaatatcaagtacctgtttttgatctgccatactcttttcgtgttgtttggacaatccgtcctgtcccagcttgctgcttgcccggacagcctcccgacggtcgatagacggtcggggtattaggctcccccttccctttgtttcgtggcagacgggcaagcccgtgtgcctcctataaccggcaggataaccgttaagggatggaggtggattgttcgcgttatacaatctgttttcgactcccggttcaatccaccatcgcctgtgcctttgccagaagcgataaaaaaggtttgcgaagcgatttgaggcgttcttggtcttcgtccatgtcgaagtccgtcactgatgcctcggtgtcgagaatcagcccggcgaggtctttggcggactcgatgaaagcagcccattcttcaccgaggtcaaaccggaagaaatccacaagcggcgaactgtcatcgaatctcgacttgtgcaggattttttgcagggcggcgtgggcgatgcagcacaaggctgtttcacgatgttccgtgaccaaagtgccggaatgtgcggaggtcgtgttggaatgggtgtccgaacagagtccggtgtcacggtcggcaatttcagtctttgccagacttacgagttgtccacatattacgccagtttcggcagcggtcgttttgccgattacccaatcggacaatacctcacggagctgtccggcaaaatccggctgctcctgtgcattgcggggctgtgctgcctgaccggattgtacggtcatggtaatgaccacgcttttgggaagctggatacgggtcagcaagccgaatgcctccattgcactcaaaaaagaacggacggtagccctgtgccaatgccactccgatgcgaggtcggaaacggtcaggtggcactggttgggttgcagcacgtagtccttctttcttaaaaacggagaaacgaaacctgccagtgatttgtccaacaggtcacagtacgcttcggtgcgtgtcttgcgatcgtcccccttttccttgaggtagtcgaatacctccctgtctgccaatatggaaacaggtatcttttggttatttttcattttcattcggttttaatgattcatattgtgcggatatatcagtgttgccgctgtccgcttcatgcggcagatttgcgtgatgattgtcgtgataggattctgacagcattccgagatgctttgcccatccggaaagtgtgtccgtatccttgcattcggacatgacccgaacggagggatagaacagggctgccagaagaagataggcaatggttatcgccaaggtgtacagatgcggcacaaagccgatgaccagtgcgcccgatgcgagtgtgacaaatgcacgggggcggtcaagcaacctgcgtaaccagttgtccgtccgtcggaacgaaaacattgcggcacagacaccggtagagagtaggattccaaactcacccatatgtccacaggcatatacataatggaaaagaagcaggcatatcagccatacttgcacatacagtttacgggcgttgccgcttcgtgccattgccacgtaaaaggttgccatgaaccgcttgttgttcttgtacaataatattgataccccgaaaggtatcgcgcagaaaatgagtagcaggatattcagtaacataagtaatagggcttttcgggtataggagtgggacgcacaatgagttccaactggacaacgccgtatgtcgccagccggataagggtttcggcatccttgggcgaaaagtacatggccgctttcttgatgcgctgcttgaatgtactgtcttgctttcggtagatggccaaagccttgtccagttcgtgttcgggaatagtccatgtcgtaccctcggcgtgtatgccgttcgtcttgaaggcacgcagtaccaatgtacgggaaacgaggtagtcggtgcggtcggttcttgagatgatatgctccttgtagagattgtcatcggcaacctctatccacgtccggtaggcattgatgcaatagaccatctgtcggtataaggtgtttctcatataaaattcatcagcacgtcggacttgtctttcttgtatttcaggaacccgcttttggagtgtagttccaagtcgaggcataagtccccgtacatctgctccaaagaatcatagatggtgacaaggatgctgtttacattgccctccgtatccgtcttggcgttcatcttgaacatctgtccgaaagcgggattcgagtatgcacaagtgctgtgaccgaatttttccgtccgcatcggaatatggtggtagagcgtgatcaactccatgtcgtcctcgaacatatccattacttcgtccagttcgtaaggggtgcgcaacggaaacgtaagcagcacatagtcgccgtagaactgcggttcttccatcgtcgtcacatcgagcaactgcggaagttgcagggggacgaatgccatgaagtcattataaaaatgtcgtaacatattcatatctttttctgttgttatattttacagcgtgtgtatgaatgcctccatcagcattccgggcagctcgtccaagcggttgtctccggggtgcagcatcctgcccaactccctgaaagcgtcgggtgtctgcgaggcaagcatatcgagttgctctctttcttcggctgaaagcaacgccaggcagaaaccgtccaacgacgaataaggctggagaagcatccagatgtaagcttgtgcctgtgccggtgtcttgacttttttattgcagatgtcgtcgatacaggttcggatattctgaatcagcctgcggttggtgcgcatggccagataaatcatggcattgcgataggtgatgtcgttccgttcggcggcaaggaatatctgtgcacagcatcgttccgtgtcatgagtgatgtcggaaagattctcgccgtcgaaatcaggcagacgtgaaaggaatgcccggtacacggcatcctccttttcgataaaggtcgtcaggtctgccatacaatgaataccgtaatcaatcgtttcagcaagggtagttcgataagtggcaagaatgtgttgtcggtttctctgactgacgggccggttatccaatgaggcaaagaacggtcggattgtttcagccgcacgatgcaactctttgtcttcaagatgcggtgagatttgttcttttacccacagtatatccttataagtgcgtgtttgagacagcaccatccgtgaaaattccatgcggatggaatcatgtatctgttcacactcttctcttacagtggaatgaagccggccaagcgtatcacattcgagatgcaggaatacggaatccctcaatgtttgccattgcttgaggtgtccggccaattctttaatggagagttttttctgcctgcgtatgtcggacaggtattccctgtatgttccggcagggtcattcttggctttcgccaatcgtttgccattgccgttgtcgcatgacgcgcataggaatatggcaatcgaaacggcaattattttggcaaagattatcggctgttttaagttcgattttaatgttttcatactatatcatttcgtactatttagtgcaaaactatatattatttttgatacttcgcatccgaaaaaccgtattttgtgcattttttaatatcgtacttaatagtatgattaccaatgaaaacaagtgaagataaaacacggggaaatgtacgattttcgttttttaatatagtatgattcatatactcgaataaaacttgtatatttgcacttgttatcatgaatattgtatattgatatggcaaaagtcggttatatattcgaggctaattcctacgatgcgtttgatgcggataaggaatggatgcgccaatatgggtgtgtacaggtggttgaagaatcggtcggacacgagacgcttaggccgagatggaaacaactgatgtcgaatcttgaaagaggagacgaattggtgatgtcaaaattcagcaatgccgttcgtggtttacgggaactatcggcattgattgagctatgccgcatcaaggtcgtgcgtattatctccattcacgataaaattgacaccgacaacaaattgtttccggacacgacaccggcggaagtattggccatgttcggggcattaccggaggaagtggctgttttgcggaagtcgtcggataaaattatacgcctgcagcagagtatcagtattccgatttccaaaaaaagtatgagtaaaactgaacgggacaaaaaaatcgtggatatgtataacaatgggtattcaatccgtgatatttggaaagaaagcggtgtccaaagtaaaagcaccgtgtacagcattctcaataaatacaaggttcagcttaaccgaacaccgggacgagtgccgggcatccggaaatagaacttataaatcaatatggatattgaaaatcaatagattgcttgcgtaattcatcgttttttcgtatctttaagttggatataactatataaaaacaagacctatgggagatattataattttattgctggtgttcttggtagtgggcaggcttttgaggggcgtgttcggaggattcagcaaaagcagttttcgggatgacaaataactccggattgttgtaactggcagatatttgttaattttgcaccgtattcataaaaatcaagaacaatatgacaaaagcggaaattgtcgctcagatctcacggcagagcggaatagagaaaacggtggtgatgactgtgatagaatcattcatggaaaatgtaaaagagtcgatggttgcgggaaacgaggtgttcttgcgcgggttcggtagctttatcatcaaacggagagctgaaaagacggcccggaacatttcgaagaatacgacaattaaaattcccgctcacaatatccctgcattcaaacctgccaaagcatttctgaatgcggtaaaagagaacaagtagagtataaaagtacagatggtgcaacaacaccgtaatgagtaaaacaaaagcgacccgaaggccgcttttgtcgtgataaggcaaggattatttcttgccttttttcgctggtttggccggcttttcaggagtttcctccttctcgacgggcggatagaacttgacggcgaccatcacgatacggttgtgtttcacaccgctttggtcgctccattcttcgggcttgaaatacccctcgacggtcagcatcgtacccttggtcagttggtcgaacgacccggtgttctcgtttttacgccacgcctcaaaattcataaaggcggaaacgcgtttggattcctcgccattattctccaatcggcttactgccagagggaaacgtgctacacttgcgttggtgaactgacggatttctgcatcctttcctacgaaaccggttactacgaaattgttttcaatctttttcataatgaattgtttttagaagttattaaatcaattttacgctgcctcaaaaagtaggtgcagttaaggggatgcaccaaggccggacgcatcaatactctttatttttgtccgtaggcaaaaccggaaggctcgataaaggaagattgtacggctgcgccattggtcaagacttccaaagtcgttcccgtctgcatactatctttgcatcggaaaatgatgatgacttcggcggaaaactattctgaaaatgagcggaaaaccgtagttgcaggggaagtgaaagtgcaatccgtccaccggcacaatggtgcgcgtttcggctgtaagtccgcagaatcggcaggtattttcgtgtaattcggtcggactgaattgaggtggctacaaacagaacactgaactgacaacaggttgcggtaccgcagaagggaatatcaacgaagtggcgacaaaaggcggaacggggtatcggggtactgccatgttcccgtccggcagaaagaaaaggggacaaaagggaaaaaggaaagaaccctgcttttcggaaaagcggacggagcttttcacgaatggctgttttttacaaaaggatatggcgcagccaaaagagagagatagatgtaaaaaagggaatgcggcgtggcaggaatggaagattatcccgttcctgcctgcctgtatcatcaaaattctgccatgattacccgatgctcgaaaatctttttttgattactgggacgtctttggcaaacccataggtgatgcttgccatagccgaagacgaaataatcatcaaggcgtgttttttcttgtaggcgttccatgccggtacgcagttccgcttcatcggttgagaaaagaatcgtgttgatgatacggaagtagagttctgttacctcgtcacaataaggacaaaagctatgctcaatcgttgctttcatgtttctttgattttaattctacttctacttctacttctacttctactatgtcttctattcgaccatacaggacagagcgcaacgctgttttgtcaatggcgtaatactcggcgatatgtccgtgctgttttacgaaatatcgtttgagaacatcggagaaatcaaagaagtagcccatcaatgcgatacctcttttgaaatggatgcactctttcacgtttcgggtaatccagttcttgtcttcacggctcaacttgtctccgttatcaagttgttcccgtaactggtaaaccctgctgtctttcagcttctctaattcgggtacgtcccattggacgaatttcattgctatctgctgcatcgctcttgtatttaatcgtaaataatcacttcatcacgatactcgaccacctctttgccactactaagacgcaccactattttattgccgaagtcgccgacaactgttccctcagagtagcctttatagggggtaagcaaggtgcagtgcgcacctataatttcgctattttcttcgtattcgtacataagtcatgtcattttacggttacaacttgatatcccatttcccctgtgagaagattctgaagctcacgtattcgtctgtaaattcgtaggacagaattttgatataagttttgtttttggcttccaacgaagctatcagtctgtcgatttcttcttccggataaacccaacgagaggtaaactccgcatccacgctatcgctgtgtctattgacaaagccgtcgaaagtgtcatccaagaatgcctctatcttgtcgaggtccgctttgttttccgtccttgcgtagaaaatgtttgttgcatagtttgccataatcctaagttttaagttttttattttccctcttttagcatttcagctactttcgggcttgattgaaaattatgtcgcctcaaaaggtgttatggctctttatgcagggtttcacgaccaaatacgacctctgcaaagcggagcgtggagattttgtcgggaaccgtcaggctgtgaccttgaatacaagaaagacatgacaagtacctttgcgacacaattctcatcaggcagaccgaaagttgggatgcgaggataaaatgcctatggcagaagttacgataaaaggaacttccgtaaaattgggatgcagcgaaaaaagaaaatatcggtgcgattatcttctcttttgactgtgaatataaaagtaagggggagaacttcggtaaaggtttagtttagtctattagcttatatatatgctaaactaaagtaaactaaatataggcagatatattggactgcctgtataggtgttttgagggaaatggttacctttgcaaaaaacaatgttccttgaaagaaacagagatttgtccttttttcttttggctgtggttattcatccatagatgactgcaacaatcactcttggcgagaggatgaaaatcgtgtgaaaagacttggaaaaatactcaaagtacgaacaagtgaagagaaagaaaggtagtgcaaacaaaaaaacaagaaaatacgataattcgtgtttctgttcctaatttgtttcttgataaaaacacatcacaatataaactattaatttacaagatattacgatgtgaaattttgagatataactaaattttccagattttccctcccagttttccaaaatctgtcagtctcaggatggcattcaaatcgtggatgtcggttactttctgccttgccagctcttccatcaggccttggtaattatgcgtctgtctgttgagcgtgtactccggtggagtcagaagaatctcctccttccttcttcccgtctccccttggggagatagagaggggttttctttattctctttatttagtttatttgctaaagcgctgcttgttttggcatccctgattctctgctggttaaccagtccaccgcgacgtccggcctcctttttagcttcttgttgggcgtcccatggctccatgcggcggcttagtccgggggatgagaagcttgtctcgttcacctcgaacagcgtatagtcatagatgattcgcttcagtgtggcggttgtcacccttgctttttgtgccagtatgggaatcactttcaggctggctttatattcattctgcaatctgaggaattcgagcactgtccagtaaatgccatatcctttcataccttcttcttgtatcataatcattaattttaggttgctgccggcattggcatcatgtagtaaataagcctccatagcttttgatattggtgttttttgttagtttactatcggtctccattccataaagttctcaatcagaaaagtccgccagccttgttgttccgcgtcccaataggctacgtgagctttaatgcttgtcatgtcatgtttctttttgaagtcgctttcgtaggaaacaagggttcctcttcccatgtagaagctgccgtcctgctttcggtaggctatcaatgcatatccgtatcgcatgtattccaatagggaatttatgcgttgtgccatccattgtacagactccatgctcaatgtcgtgttttccgtaatccgtttttcccatagcttttttgttttttctgttttggatacaaatttctcctcaaattcagttttttcttttcccattttttatgtttttagggttagtaaatgtatgataatcaacaatgaaaaagggctactcctttcagtacggatggctacgcccttgccttgttgaggctacaccatccgacaagaaaggtgtagcccttctgtccggttgctgacggcggcaaaattaccgcctttccaggtactgaactatcagtgatttatccttacatcatatccgtatgggtcaatcagtgtggtgtcttcccgttttatgatggcccataccttctccaattcggtgattatggtgctgtaagtcaaaggcttttgctctcctctggctctctttgtgaagttttcggatgctacgagcagtttggctatatccgttatttttctaatttttgtgccttcaaaatagcctgatttaaaggctcttaagtaacctacataaacatgggtctggtctccgtagtaaacccgttctgacaatagcttttcatccactatggaactgtgttcttttacttttgttacttttagtttctgtgtatcagattgatacgacatgcttctctgttcgttactgttgagatgcttctttttttgagttctttcatttgtgtaattcttcgttcgtttaactgttttttattctggttaaaaaatgcgaaagtataaaaagtgagggagaaataagggaattttggtgggaaatgtgaagggtgagttgtaaatggttgatatataagatgatatgctgtttaaaaaacgtacgtttaaaaaacacctatttcgaacttatacaagacatactcaaagagctaaaaataagaagattttaactgattacagatattgcatatactactgaaattcaatgtaatatacttatcattatttattattaggaacatttttctatcaaacattttgccattacaaaaaacgtctctatctttgcgttcattaaacgtacgattaaaaaacgcttttttgtttctaatacgttcgtttatagtctcttaccaaaaggtaatgaacaaccacagagaatctgttgacaagaagggcatagtgcttgtcaaacttcccataaaatgctcgcaagtgattgaactacagttatgtaatagtagttcaaagcccccaaggaatacctttttctaagtaaaattaacaagaatagaaatggataaagagaccgaagtttggtttgccatgcgtgctacataccgcagggagcttgaagctatgcatcttctcgaaaaggcaaatcttggctgtttcattcccatgcaatataagataagtatccgtaggggcaggaaagtccgtgctttggttcccgtcatccgtaacctggtttttgtccacgcacgtccttccgaagtgcagcgatttaagtctcaaattacttatttgcaatatattactgatacccgtagcggtcagaaaatagtcattcctgaccatgatatgcagcgtttcatagccgttgctggtacctacaatgaccatcttctctattttcaacccgaagaactgaatctctccaaaggtacgaaagtccgtatcaccggtggcgacttcgagggtcaagaaggtgtttttctaaaagtaaaaggtgcccgtgatcgtcgtgtagtgattgctatacaaggtatcattgccgttgccatggcgaccatccatccggatctcatcgaagtaatccgctagtctttaattgttaatttataatttttaattaatcatgtctcttttagaagaagcactcctccttcagcgtgctgcgcacgatctgatgtatttgggtatggacgggagtcctatctatagtgatgacttgtcccgtcgtaacagcgaagtctatcgcttgaccacaactttgtataattccagtatctggggcactacggtggaggagcaggcaaatgtctgtcttgctctcttgaaagggtatagtgcctcgttcattgaccatggtgaaaagctacaacatgtgcaggaggtattgaagcgctgttgggatattctggatattcttcctgcttcattactaaagcttcgtctgcttactgcttgctatggtgaggtgtttgatgaggctttggtggatgaagctcgttccatcattgcttcttggagtgttgcatcactgactgccgagcagcaggaagcagttgatgagtttcagaatgtggtggataatccttatccatgggaggaaatggaataaaaatgtataaataggatttctctttgaagaaaaaacgtatatttgcatatagcttctaaaaaagagaaataagatggaacagatgcgtaaactgccgattggtatacagacttttgaaaagctgcgtgaagaaaattatctttatgtagacaaaacagcaatggtctataagatagcatccaattccactccctattttttgagccgtcctcgccgtttcggtaagagtttgcttatatctaccttcgaagcttactttcaaggacgtaaagatttgtttcacggacttgccatcgaaaaactggaaacccggtgggaggaatatcctgtattgcatctggacttgaatgcccgtaaatatgaaacagccggagatttggtagccatgcttaatcaatatctggaaaagtgggaattgaaatatggtgcggaaaagcaggagcgtagtcccgaagagcgctttgcctatgtgatagagcaggcgtatgcccagacgggtaagcaagtggtagtgttgattgatgaatatgataagcctttgcttcaagctctttcggatgaaaagctaacggaagaatatcgtcggatattgaaagccttttatggggtactgaaaagtgccgaccgttatctccgctttgtttttttgacgggtgtgacgaagtttgcgcagattagcgtgttcagtgatttaaatcagttgcaggacatcagtacatggcccgactattcttctttatgtggtattactaaggaagaactgctcacaacgtttactccggagatagaacgtttgggtgtttccaatggaatggactttgatacaactttggagcagatgaccaagctgtatgacggttatcatttttacccccattgtgaaggggtttttaatcctttcagtgtgttgaatgcatgcaagtcgaagattttggataatttctggtttcagaccggtactcctacctatttggtaaatttattgaaagagagtgattatgatttgcgccttctgattgagggagttgaagtgacggcttccgccttttttgagtatcgtgcggaagtaaagaatccgcttcccatgatttatcagagtggttatctgaccatcaaagactacgatagggatgttttattgtacactttgggttttcccaatgatgaggtacgctatggtttcttgaatttcttggttccttattatacaggagtgactgatgatgaaaccggtttccacatagccaagtttatgcgtgaactccgttccggtgatgtggatgcattcatggaacgcctgcaagtattctttgcaggcattccctacgaactgagcaacaataccgaacgccactatcaggccatcttttatgtcgtcttcactttgctgggtcaattcgtacaggcggaagtgcgcagtgcgcgtggtcgtgccgatgccgtggtgcagacaaaagatgccgtttacgtctttgagttcaagctgaacggcagtgccgaagatgccttgaagcaaattgatgagagaggttatctgattccttatgtgctggatggcaggcggctggtgaaagtgggggtgaacttcagcaaggagacacggaatgtggagaggtatattgtggaataactctttagcactcatgcctcggcaaacttcctttcctatgaacgataggaatccaaactaataatacttaaaactcaagtccttttttgatattctttatgtaagcagtcaaaaaatggctattgattgctttccttgcggaaaaatgttttgagatggttcattatgcagaaccgggtaaaaagcccgggtggggttatttcccttctgaaagccatccggaggtagtaaccaattttgaaggcactagagccactcctgaatttctgcaggctattgcctatgaagtttatgtgaagaatgtgactttcggtcttcttcgtcaatagctgacagatatgggcatgaccgtttctaaaaacacattgtgcaactggcttaagaaaggcaagaaatacctggatgaattggtctgtgtattgaagtccatagctttggaaaaagactcgattgtgaattgcgatgagacctggtgtaaagtgcgtaaatatgatcactataagaagtgctacatttgggtgctggtcaacaaggctcagaaaacagccattttcttctatgagaatggctcgcgcggtcgtgatgtacttacagactttttgggcgatgcagaattgaagagtattatgtccgacggatacaatgcttatgtatttatcggcaatgagttgaaatcagcccggtttaaatatggtagtgatgccggtgctgggatggctgcaacttatcacagtatgataggaacggtaaagcttcatggcagttctgtctggaacttcatcggaacttttttcaaaaaaatctttaacggatgccgggattatgttaacatggttcctgacaaaatcactttggctacaagccaatgttaatttcaaaactaattaattaacaaaactcgatttagggcacagaaaagtgccctttcaaaaggggatgccctaaattgagtgcttacagccgcttgtttaatccagaaataaacaacaagcaagaaataaatgagaacattaggttctaacgcaatatataatatactttacaagagtttgaacgcattgttccctttggtcactatggcatatgtatcacgtgtgctattgccagttggggtaggcaaggtcgcatcggcacaaaatatagtgtcatattttgtgataattgcctctttgggacttcccacatatggagtgaaaaagatagcagaatgctttgatgaaagggagaagcgaagcaaaacattctcagaacttgcagtaataaatgcgatcagtacattgatatgtatatgtgtatacttgggcatagttttaggaattgactattttgaagacaaattactcatatcatttattgttggcattcaattatttgcaaatattttcaatattgactggttctatcaaggtatagaagaatatcgttatataatgtttcgcagttttattgttaagctgcttgctttagcgtcagtttttatatttgttcataatgcaaacgattttcctatatatgctttaattgttaccctgagtcttgtttctaactacatttttaatgttgttaatttacataaatatgtagatttccaatataatggccttgatgtcagccgccatttaaaacctgtatttgtacttttagctacaacgattgctattgagatatacacgctcgcagatactacaatgttgagtctttttaagggtgatgaaattgttggctactatacaaattctgcaaagaccgttggaatagcacgagtcatgatagctgcagcaagtgcggttttcttacctcgactaaactactacttaagtcatggaagagagctggaatttgagtcgctggctttcaaggggctgtcgatgctacttactttatctttgcctgtagccgtagggcttatgctactagcagaagattgtactctcataatgtttggtaaggagtttgaagcaacaatattatctatgcaaatactcactgtttcagttgtaactattgctattagtaacttcacaggatatcagatattagtctcattaggaaaagaaacaatagttttatattctacaattatcggagcaataatcaatgtggtgctaaatgttttgttaattatgccatatggacattatggagcggctattgcatctgttgttacagagtttgttattgcagcatatcaattgtattatgttaacaagtacataccactttctcttaaatcaattgtcaagcagacgtttcttccgctggtagctatggtttctgtagtatatgtgactaagttattgtttgataatatctatatacaaactgtaattgctgttctattaggtagtattacatacttatttttatgtattgcttcaggaaacgaaactattactttgctcaaaaataagtgcaaaaaataatatatattatgccacattacgattacctcatagtgggttctggtctttacggaactacattcgcatacaaagctaaacaagcagggaagaaagtgcttgtgattgaaaaacgtcttcatctcggtggcaatgtatattgtgagtccattgagggcataaacgtgcataagtatggtgcgcatatcttccacaccaacaacaaggaggtgtgggacttcgtgaattctatcgttgagtttaaccgctacactaactgtcctgtagctaactacaagggtgagttgtacaacttacctttcaatatgaatactttcaaccgtatgtggcctgaggtacatacacctatacaggcaaagaaaaagattgatgatcagaggtcagaggccgtagctgctcttggtggtcgcgaacctcaaaatcttgctgagcaggctttgtgccttgtaggcaaggatattttctacaaactcatcaaggaatacacggagaaacagtggggacgtagctgtaaggatcttcccacatttatcatcaagcgtctgcctgttcgtatgatttttgacaacaactacttcaatgattgttatcaaggtattcctatcggtggctacaataaactcatcgaaggattgcttgagggtgtggaatgcaagactggggtcaatttcttcaattcagagtacaaggattggaagaactatgctagcaagcttgtttatactggtgctttagatgagtacttcgactataagttaggtaagcttgattggcgtaccgtcaacttcaagactcgtgtagaaaatacacctaactaccaaggtaatgccgttgtgaactataccagtcacgatgaactttatactcgcgtcattgaacacaagcactttgagatgtttggtcaggaagtttatgattgtccaaagactgttgttagcgaagagtattcaaccgaatacgaggaaggtatggaaccatactatcctgtaaacgatgaccgcaacaatgcccttgctaaagagtatcgcaagttagctgaaaaagaagaaggcgttatctttggcggtcgccttggccagtatagatattttgatatggctcctgtgattgagcaagtgttgaatattgaaaatatttgagtatatgaaaaaagtgttgatatgggatttgaactatgtattaaaaaactctggaggtcctgctggatatttatacaatattagagaataccttttgaagcatccaactaaagatgcagaaatacattttttgaaggatgatttaggcattcctaatgttgataggtctgtaaatactaaccataaggacttgatgaagaaaatacataagttggatattctctcacttatggggtattttcgcaccttcagatgcttaatgtattggaataagaaactaagtgcaaaatctatatctggtataaatctgaatgattttgacgctattcattttcataattctggagatttgtatagagcttctgaacttcttaggtcttatgaaggtaagattatactgactacgcattctccgcaaccaaaggcatgtgaggatgtagagaatattgtttataagtggtctgttttgcgaagattaataaaaaaacaaattttgaagaaagaattacaaggatgggaaaaagcggattatataatgtttcctgtgcaaggtgcactcgaaccatattatgtagaaaaagagataaaagattataaggattgcaataccgataaattcatttattgcgagagttcgatacttgacaaaccaatctcaaaaccgctagatagagaagaattaggtatagattcctctaaatatctaatatgctatttggggcgtcataatgaaattaagggttacgaccaactgaaactctttgcagagcatatcttgtcaaaagatagtagatttgagtttgttatagcaggaaacgaggaaccattaaccagacttgatcatccaaactggaaagagttaggttggattaactatggtaatcgtttggtatcttcatcggatatttttattttgcccaataaggaaacgtattttgatcttgttactttagaagtcatgagagaggggattcctattcttatgtctagaactggtggtaacaaattcttcgaaaggtacggagaggagtatggtattttcttgtataactatggagacataaaagaccaagaagcacaattcaacaaaatgatttatgagttggaaaatggaatattgaaagtcaaagctaagaaacttcgaaacttgttcatagaacattttacaatggagcattatataagcagatatatagaaaccgtaaagaatatttgctaataatagtagctgtttttaattatgttactattttttacattaataacaataataatagacctcttttatctatttgtatcactaaaggcagtattaaaaaatagatatagtatactacacctatgtagtatactgttttttattattcaagtattgccgctggtagtagatatgttcaatgatgtaaattcattaggtacccatactaaatatttatataatgcactgactgatgaaaacactgcatatctttataatttgtttgctatttttgtaatggtaggattgacgtcaacagcacaaaagtttgcacataaaagagtaaatattatgtttcaaaggacaaaagctataaatagcttttaccgtttatgtattgtgttgttgatgttcgctccagtagctgcagttattctggcgccaacgcccgaaatctacacgaatttttcgtatttttacactcattcgtataatccactggctgtagaatatttgtatcatagattggtaatgccgtatattatctatctgtcttttctatcgatactggtatattattatttaattaaagggagcacaagtaaaaatattataatgcttctttctagtgtcatatgtatttggatagatggaaaaagaggtctgctggcctttctaattgtaggtatattactagtagattttataaaaaatcagactcaatctaattggaagctggtaaaaaaaggcgcgttactttcttgtgtgtttatagcctactttgctgtatattctatgttcacaactaaaaatactgatgatagtttttatgaaacatacgatgcatattttagccgtgagtctgaggtgaaattatctatttatagccgtcttaatggagcggatatgctgccttacgatggtgctactcttttatatgatataaccctcaaatccgcaactacgcgcctaatatgatacagaagcgaaaagaatctgcatcgttagtaaaaagggggcacagtgcatcgaatgtcaccataaagacatataaatgccccttaccccaccatgcgacttgaggcaatacgcaaaatcacgactataagttgtcggtgttatccaaagtcattctggaacacattggcataagcattgttgcatgaatagatattcagcacatacttccttgatgtcctgacccatttggctggcacagagatgaacttaaagacaaacgtcttgatgcggcttgttgctttgagtccgaacctcttcacgtcaagcctcgccatgatgaatttatagaagttgcgtatgagtgccataagcagaagaaacaccgtgttttctcccataaaggattttggaagcctgttccagccgaatccgttattcatatcatcgaagatgcgttccttccctccacggaggttatagaattcgacaatctctttctcggaagactcgtagtcatttgtaaggatgcagcggtaggtgtattctccttcccacaggtcgagttcgccgtctatccgcttctgtctttgaatcacaagacggtatgccttccctttccatttctcgatgagaatggaggccagctcaaactcaatgccgcccaattccactttcttccaacctctgagggcaaagatgtcattgtagagcgaactgcatcggttagcacggatatagaaggtcttgcagtgtttagcaatctcttccactatctcttcagaacacgagccgcaatcagctctgaaacggttgataataagcttgttttgttcaaacctttcaaagaacctcttcagcgtgtccttctggtggaaacggacatttgtgttgccgtcgctgttctcaatgccgacaatcaagttgccaataaccgccacgccagggcgataaccaaggaacttcttgtatgtaggcttcgcatcaaacttctcagcctctatgaactggtggtcgaagtcaacgtcatacccctcgccctctttcagctgccctgtggacaataggcaattgaggagcagtgtattcagcttgtctgccgtgttgaagtcgtaggtcttgccagtgtcggatgtgtaggaaatgttatcctgggtcagttcctttatggctctaagaatcgtgtcggcactgcatgtgcgaagtgtcggatgaagcgaaaggtggtacatcagatgagtggtgacatcctcgatgcatgagccgccacaaaaataaacgctcataagcgaacggatgatttcgctgtattgataaccatacagcctgcatctcataccgagggttgagtcgattacagatgagagtctggagtcaaattgctccattattgaaaatattcctccaaaaggagtgagtttctcggatttaattgctacctttgccatgtctgtcgggtttgatacatattttgatttgcaacactaagataggtgaaaaatctgacatggcaaattcctgagcaactttttgttgctcaggtacttaaaaagttatatttgtaatagtgttgcggaattaaggataacttgttacattccaagatttttatgggaagataagccatatggtttttttaattatctaacggcctatgcctacaacggacacgcagagacatttatggagggttccaacttccaagttaatatctggtcagaatatatagcaaattttggactactaggctgtatactctcgctattgtttattattggaattgtacgagtgtcagagcggtctaatgtggcaatgctaaatatatcaggaagtgttttcgtgttgatatatttattctttggatttgaattaatagtaatggttttgttttatgcttggttgtatttctttgttttcaaaagaaaatcaagcctacatcgaactagaacaacttattgaatattcttaaatagcttgtaatggacgtaatatatatacaagatcaggaaattgaccattacaatggccaattctatcattccaaatcggagcacttcttctcacgttttcttgcgggcttaaatgagaatgatactttgacagtatatacaggcatcatcaatcgtaactgtgctcaggaggtggctaaatacaaggatgtaactaaccctcgtatcacttacaaacaggtaccggagtttcgtaatccgaagaaccttcttgctatcaatcgcttgatgaaacgggttctcaaggatgcagatttctgctatttgcgtagtggcattgctgcctcatttgccagcactatttgtctcaagaagcatataccctatatggcagtagtgaatgaggacatattccgtaatacgattgcccattctcgtctattggttcgtttgtcagcctatcctctttcttattacacccatcgcatggttcgagaagctaactatgcttgctatgttacacaggattatctgcagagtaactacccatgcaaaggcaagagccttggttgttcggatattgagttccttgatattaatgagttgtcattgacaaaacgtttgaataagattcagaagcaagagggaacgattgtactgggaactgtaggatcagtagatacagagttgaaaggacaggatactatcatcaaggctttggcaaaactaaaagccgaaggtttcaccaactacatatttcaaatggttggaacaggtaaacctaatcgtctacgcaatctagctgccgagtttgggattgctaatcagattgaatttctaggcgagtttaagcatgatgatgttcaaaaatggttcgaaactattgatatttatgtacatcccagtcgttcagaaggtctccctcgtaccatcttagaagctatgaccaaggctgttccttgtatttgctcttctgttggtggtataccagaactcatagatggtgattcgctttttacttacgatggtacagagattgatactttagtaaatataatcaaaggctttagcaaagataagatggagtttgaggcaaagattaactttgagcgttcaaagaattacgaaccgaaattacttgagcaaaagcgaactgttttctttgcacaggctatcaatgaatttcgtaagaaataaaagataaaatcgacattatgaatttatattattcttgaatttgtcgtaaacttggattctctaataacgacaatatgggaaccgcataccgcaagactatctaactttgatggtatatgaccaataaaagaaatcacaagcttttgagattctctctaatacagacaaattcttgtttgtggacaatggtagtaaggcttgtctttttgttgaaacctataactatgcttctcataatggggagtgttcgttgtaattgacagaaagccacagaacttccgcatcatcattgttactccaattcaatggcatatccattcttcttttagcacaatggtagagtcctacagttcctttgctctccgcaaatggagaaacttattgagtggttcagaagtgtagtcgaacttatggtaaatctatctatgtgtagtatacttattctcaagcaggagaaattgaggtgattgactatagatgctctttataataatttgaaaaatattaaataataatggcaaagacagtttatcttggtatgataggcgatatcatgcacccgggttacattaacatcattaacaaagctactgagtatggcgatgtgataatcggtttgttcactgataaggcgattgctaaccaccgtagacttccttatctcacttgggagcaaagaaagaacgttgttgagagcatcaggaacgtatcaagggtggtccctcaggatgattggagctatgtctctaatctccttaagtacaagcctgattacatcattcatggcgacgattggctggttggccctgacaagtatatccgtgatgaagtattcaaggtaatggaaaagttgggtggtgaggttatcgagattccttatacccaaaatatctctgcttctggcatcaagcaggagattgatactcttggcgtaactcctcagatgcgtctttcttctctccggcgccttattgctgctaaaccgattgtacgtattcttgaaagtcacaatggtcttactggcctaatagcagaacatactaaggtagaggtagatggtcaggagcgtgagttcgatggcatgtgggcttcctcccttaccgactctacctctaagggtaagcctgatattgaggctgtcgatttgactacccgtctccatgacctcaatgatacccttgaagtaaccacaaaacctgttatcttcgatggcgatactggtggcaagattgaacacttcggttttaccgttcgcacccttgagcgcttgggaatctcttgcgttataattgaagataaggtaggcttgaaacagaattcactttttggtactgatgctgtacagactcaggatacaatcgaaggctttcaggctaaaatccgtgcgggtaaggaggcgcagattactcgtgacttcatgattgtcagccgttgtgagtctctcatcgctggtaagactgtagatgatgctttggagcgttgtcatgcttacgtagaggcaggtactgacggtataatgatccactccaaagagaagtcaggagaggacatcaaggagttttgtttccgttttcgcgagaaagatgctcatactcctatcatcgttgtgcctactacttataaccagttcacagaagaggaacttgctgaatggggtattaatgtagtgatttatgctaatcacatgcttcgttctgcttatcctgcaatggttaaatgtgcagaaaccatcctctatactagccgttcgcttgaagcatctgagcagtactgtatgcctatcaaacagattcttaatcttattccaggcacaaagaagaagtaaacattaatttcttaccccttaaactattttacaaatggtaagacccgaattttttgtaaatatactcaaggaacaaggcatagacttttatgctggtgttcctgattcgttgctcaagaacatttgtgcatatattaccgaccaccttcctgctgagcagaatattattgctgctaacgaaggaggggccatgggtattgctgtaggttatcatttggcaacaggtaaggtgtctgtagtttatatgcagaactctggtgaaggcaatatcattaatccgtttgcctctcttaccgacaaggacgtttataacattcctgtgctcctcgttatcggttggagagggcgccctggagttcacgatgaacctcagcatgtgaagcaaggtaaggtgacaatcggtttgcttaataccatgggtatcaactatgctattctgccaaaggatgaagagggagctgcaaagcagataaaaatagctgtcgacttcatgaaggcaaccaacgagtgctatgcccttgtgatagagaaggatactttcgatacctataagcttcagagcgttgaggtaaacgaactggcaatgtctcgcgaagagacgattcagaaggtggcttcaaacattgaagataatgcttgtatcgtatcaactactggtatgatttctcgcgagctctttgaggcacgtactgcttggagccaaggtcatgaacgtgatttccttactgtaggggcgatgggccatgcttcccagatagctctcggcatagctctccaaaagcctgagcgtcgagtatattgttttgatggtgatggagccagcatcatgcacatgggtaatatggctattacagccagcatgaaatgcaagaattatgtgcacattgtgttcaacaatggcgcacacgattctgttggtggtcagcctactgttggtctcaagattgatttttgtgcaattgctcaagccgtaggttacaaggctgcttatagtgtagaaactatggaggcacttgaagcaaaacttgcagaattcaagaacgcagaaggtcctgttttccttcagatttgcgtaaaaaagggaaaccgcaaggaccttggtcgtccaactacaactcctattcagaacaaagaggcttttatggaatttcttaacaagtaaagtatgaaagtaattctgtttgctgatatacacgccaatctttctgcttttgaggcggttctagttgatattgagaaacactatcagccagatgccatgattagtctaggtgactttatcgactatggtatgcgttcaaatgaaattattgaacgtatacaaactgttaatattccattacttgccaatttgaagggtaatcacgagaaggctttgattgatggggaactctcatgtttctcttcagaaagagctcgtgtgatgtccaaatacacaagaaaccatctcactcagacatctattgattatataagcaatgtgatgcaagagccaatgcaagagttggaaattggtggtaagaaagtacttcttttacatggaactattgatgatccctattggggaaaactgactccagcaaaagtggaagatgaaaagtatcaggattttgactacgtattgagcggtcacattcatcaaccttttaagatagatgtattcttcaaagttgacaatccaatcatgcgcaatcagaaacgtacgacttttatcaacccaggttcagttggacaacctcgcaatcagaatccatatgcacaatatgtgtatatcaattttgaaacgggggaaacccatttcaatgcagttccttacgatattgaagctgaacaatctcttttccccaaagagatagatactttttacagcgaacgattaaaatttggaatataaatgaagaacttatatgtaataagtggtgttactggcatgacgggtagtgaactgtctcgtcagtttgtttctcagggtcatacggtaatcggtttcgacaacttctttgcaagttctattgataccgttaaagacattattgacaatccctcgttcatcttctataattacgacattaacaaagtcgctcagatggatgaagtatgcgataaggcgaaagaactcaaaattgagtgcgatggtcgtctggtgtttatcaattgtgctgctgttgtccatacaaagcatttctatgaggtagagagtacttttcagactaacgtccttgctatgaaggatttcttggagcgtgccatttctatgagggctgatacttacattaattgttcaacttcggaggtttactcaatgcagtcttggaatgagaatggcggtgtgaaagaatctgattatttggcaatgtcaacagcggaacatagccaacgtacaagttatgcttgcggcaagttgatgactgaattctttatgaaagatgctgttggcaagggacgaattaaaggttgttctattcgctttgctaatgtatatagcaggcacgagcgttttgcagagcacattatccctcatatcattgataatctgcttgaaagccataccgtaacccttcttgaaaactcgaaggtgaacaaacgtaccttccttcataatattgatagctgtcgtgccgttatggagctcatcgcttctgaggatgctcttgatggtactgtttataatgtggctactgaagaggaaattgccattattgatctagtcaagacgattgcaataaaaatgggcatcaacgatgtggatatccgtttcgaaggttaccgaaagtctgatcctgagcgtcgattgctcaatacggacaagattcgtacccgtactagctggaaacctatcatcactctcgatgaaggcctcacgatgtgtgtaaatagtatcaagaaatgaaatatttgattataactgttgctggaacggctacgcgttttaatcgcgacactaaggaagaaaccctcaaatgcttgtattataccgatgaacctcaatacgctcttcttgctcaattgctgaagaattgtggtgagtacgataaatatatccttgtggggggctacctttatgagaagttgggaagatttgtaaagaacgaactctctggttatggcaaaaaaatagaacttgtttacaacgagcatttcaaagactatggctccggctacagtttatacaaaggtatagaggcaataaaggaggcaggtgatgtgactttcgtagaaggcgacttgttctttatggctacagatttcaggcaagtgtataattcgccaaagagtgtgattaccattaaccgagaaccaatctactcgaataaggcagttgcgttatacattaacgttgatggcaaaccaaggtatttatatgatacgaaccatcagacattgactgtatcagagccattcaaggcaatcttcaacagtggtcagatgtggaaattttcttcatctgagaggcttttgaagactgttgattcgcttacaaaagaacaacttcaaggtactaatcttgaaataattcaggcttactttagtgatatgaatagtgaagagtatgatgtagtgactttcactgactggttcaactgcaatactgttgcagattatgatattgtaagaaaattgatgtaaaaatgaatatggctgtattagaaagagattacagaatagatggaataaagtggttgctcattgtattggttacattcggtcatgtaatagaacctgctttaagcaatcctattgccaataagctctattctataatctacatttttcatatgccattattcgtctttatcagtggttattatgcaaatgttaaggataaagaaaaactgattagtaaaggttttatgcttttggaaacatttttggttgtgatgattcctcaatgtttttattatggaagtatcatccctttactaaatccgaagaactcaggctggtatttaatcagcctaataacttggtatattatttttctgttgattatcaataagctagttggcaaaattgtcgtacaatataatgggtgcggggggcagttattgatattcagttgcttgttggccgtatttgcatacatgcttccgttgaaacaatttggtaacctgttatcgttccaacggtcgtgtatgtttctaccattctttatgatgggtttcttgagaagagtaaaaggcctgcctattattcctgatgtttcaaaatgcataaagcttgttttggctatagcctctttagtatgttttgctttttgtctcatctatagtggccgtatactacatgtattagagtttaataatgccaatgtgtggcacatgtcaaatttgtacaatcaaaatataggaatgcttcttgttttgaaagtattggtttatattggatcaattattactacattcgctgttttaatgtttgtgaacctccccaagtcgatatgtgcttatggatcaaagactttagcatattatgtaatacaaggcatgtttgcacacatattatcaacctatttgcaagttaatttttaccaggccttgtttctctgtgtttgcatattagtccttacaacagttctattacgatttgttgattctaaatttattacaaacccgttttctactttattaaaatggaaatactgaacagaaaactttcccttctcaaagggaaggttgaaaatagtcagccaataactattatgattattggtttgggtagcgttggatgctacttgttggattatcttgtatcactaggtgattcacaacttcgtcttgttgtggtaggacgtaatgcagaaaagatgcagatggatataaatattattcgtactgcttcaaccattcgtcaccagtgccgtagcgagattaaggtggttgataactgcgaccttaacgatgtgaacagcattgcagctgtacttgaagcagaaaagcctgacttcatagtaaatagtagtcgagtttactctggtttgaagtatggtagcatctcatggagtaatcttcgtgcatacggtatttggactccgctttctattcgatatgcaaagaatataatggaggcatacgataaggccaactgtgaggcaatctcaatcaatacttcatattccgatgctgtcattccttggctaaagtctgcgggtaaggcttattttgactttggtagtggtaatttgaatcatcttgtgcctcgtataaaattctatattgcagagaaatatggtataaagaattttaatgacattgatgtaactattgcggtatcacattttcatgatgttgtcatttctaaggaaggtcatgcagaaggtcaggacatcttgcttgatataaagtttcaaggcaaggatatggattttaataaggaagaacttcttaaatcctgttctatagcaatgcctgtagatcagaagcgcaatatgatgaatgcttccagtaattttgatatcatattctctgtgcttactgctcttcgagaggaaaaacaagtcaaaatacatactcctggggtaaatggtgaaattggtggttatcctataattattgatggagtaactgctactgccaagtttgatgagtctgtatggactatagaccagatgcgtaaagctaaccgtgagtcaatttattgtgatggagtagagaatataactgacgctactctcgtctatactgatgaacttgtagctaaggtaaagaagtcgtttaatgttgatttgcctaagtcggtaaagtttgtggatattgaaaatgtagcagatttaattatcaatcagataattaaacctcaagtgtttgtttttgtgcaataatttgtaaactaatggcagataatagattgttgttaattttctgtataatctttaacttatagttttatgatatacacagctatgtaagcactttaaaaagttcaaaatgaaatgttagccttcgttgtaaattaaaattagcaggatatgtatagcagcgaagatttagcaagtttttattttcagtaccagaccaaggctttacctcatgtcaagttcctccagtccttttgtatgaagcataaagttcctataatatttttcataagtggtataaggatacgcgtaataaaataattacagttctatatctccgattgttcaaatgaaaaatgtaataaatatggatatcacaacaaagataaaaagaagtaaattactttattacgtctactattacgtaatgtcaggtttggtaaatttgtacaagttgttcttgaagccagacggtaaactcatgctttttgtatgttatggtggacgtcattattccgatagtacgcgagtgatttatgaggccatgttgaaggatgaacgtttcaaggactatatcatatattgggcttttaagaatcccgagaaatatccattcattccaaatacggttaacgtcaacagccttaagtatttcaatatagccttgagggctagagtttgggtgacgaacgtaattgtggaacgagcactcaattttaaaggcatcaatacttactatatgcacacaactcatggagtattatgtaagttggatggtaaagatgctattgattctgctaatttcaggactttatcaacattcaagtgggattgctgttttgcatcttctgatattgagaagtatgtgtatgctggcatgttcggaataccaataggcaagatgcacgtaatcggtatgcctaagaatgatattttggtgcattatacggaagactacagaagtgaattgcgcaagagaattggaattccagaaggaaagaaggctattttgtatgcaccaacatttagagaagaggctaactttaaagaggtatttgatgtggatgtaaacctttggaaacagaatctgggcgatgattatgttttgttatatagagctcatccagtcatcagttcggatacaaaacagaacaatgatttctttattgatgtaacaaattatgaggtcgtagaagacattatgattgcttctgaccttcttgtttctgattattcgggcattattttcgactactgcattatggataaaccaatcttcttgtggccatacgattatgataagtataatgccatcagaggtctgtattttgacattcgtaaggaacttttgtataaggaagatcaaggtgaactgactaaggtgattaaggaggcagattttaaaaaggtagtcgaggagtatgttattccgttcaagaataagtatgaaacagaatatggaaatgcaaccagcaaggctcttgatttgatttataacaacattcaataataaataaactctttataatagattggatcttcttgtcttcctgtatattgaggacatcattgttatgttttcatgttactatatgtcttcttgtaaggaagaaaaagagtatgcatcgtaagaaagttttgctgattttttctaagactcatataggcgtgactgcttaataaatagcgggtacgctatataggtcgcttgtaattgtaaggaaatattgcgaggattgtaaaatatagggattaagatgaggatattattgttagctaataatgtggcagggttgattagttttcgctttgaagtagtaaaagctattattgaacaggggcatttcataactatttctgcgccttttgataaaagaatgaatgagttggaagctataggagcaaaatgtgtgacgactgaaatagaccgtagaagtactaatcctgtaaaagattttatgttgatatgccattatgtaaatcttataaggaaagaaaaaccagatgtggttttgtcctatacaatcaagcccaatgtttatggagggatggtttgcagattatatggtatacctcaaattgtgaatattactggacttggaactgctgttgaaaaaacatcaagaattcagaagattgtatttttgctttataagattggtttgagaaaatcaagaagaatctttttccaaaatgaggaaaataaaagattttgtgaaatgcacaatctgactcctgattgtggttctataatcccaggatcgggtgtaaatttaatccgttttcaattgatggattatccaaatgatgacacggtgaaatttatttttattagtcgtataatgaaacagaaagggatagaacaataccttgatactgcgattgctattcgtgaagagtatcctaatacggaatttcatattttgggttattgtgaggatgcatatcaggagaaattgaaaaagttgaataataataagacaataatttatcatgggatgacttctgatgtccgtccttttattgcaaacgtgcattgtatcgttcatcctacttattatcctgaaggtatgtcgaatgttcttttggaaagttgtgcgagtggaagacctgtcatcacgaccaatcgtagtggttgcaaagaaattgtagatgatggagttaatgggtttattgttgaacaacagaattccgaagatcttataggtaaagtccgtaagtttcttgatttgtcttttgaagagaagaaaaacatgggcatagcagcaagaaaaaaagttgaaaaacaatttgatagaaatattataccttaattccgcaacactattacaaatataactttttaagtacctgagcaacaaaaagttgctcaggaatttgccatgtcagatttttcacctatcttagtgttgcaaatcaaaatatgtatcaaacccgacagacatggcaaaggtagcaattaaatccgagaaactcactccttttggaggaatattttcaataatggagcaatttgactccagactctcatctgtaatcgactcaaccctcggtatgagatgcaggctgtatggttatcaatacagcgaaatcatccgttcgcttatgagcgtttatttttgtggcggctcatgcatcgaggatgtcaccactcatctgatgtaccacctttcgcttcatccgacacttcgcacatgcagtgccgacacgattcttagagccataaaggaactgacccaggataacatttcctacacatccgacactggcaagacctacgacttcaacacggcagacaagctgaatacactgctcctcaattgcctattgtccacagggcagctgaaagagggcgaggggtatgacgttgacttcgaccaccagttcatagaggctgagaagtttgatgcgaagcctacatacaagaagttccttggttatcgccctggcgtggcggttattggcaacttgattgtcggcattgagaacagcgacggcaacacaaatgtccgtttccaccagaaggacacgctgaagaggttctttgaaaggtttgaacaaaacaagcttattatcaaccgtttcagagctgattgcggctcgtgttctgaagagatagtggaagagattgctaaacactgcaagaccttctatatccgtgctaaccgatgcagttcgctctacaatgacatctttgccctcagaggttggaagaaagtggaattgggcggcattgagtttgagctggcctccattctcatcgagaaatggaaagggaaggcataccgtcttgtgattcaaagacagaagcggatagacggcgaactcgacctgtgggaaggagaatacacctaccgctgcatccttacaaatgactacgagtcttccgagaaagagattgtcgaattctataacctccgtggagggaaggaacgcatcttcgatgatatgaataacggattcggctggaacaggcttccaaaatcctttatgggagaaaacacggtgtttcttctgcttatggcactcatacgcaacttctataaattcatcatggcgaggcttgacgtgaagaggttcggactcaaagcaacaagccgcatcaagacgtttgtctttaagttcatctctgtgccagccaaatgggtcaggacatcaaggaagtatgtgctgaatatctattcatgcaacaatgcttatgccaatgtgttccagaatgactttggataacaccgacaacttatagtcgtgattttgcgtattgcctcaagtcgcatggtggggtaaggggcatttatatgtctttatggtgacattcgatgcactgtgccccctttttactaacgatgcagattcttttcgcttctgtatcatattaggcgcgtagttgcggatttgaggtattggaatcaagggggtaggattattttagcacaagggggcagaatcgcttggttttagggggcagcttacactggattttccacttcatacttaataattaactaattatatttgtaagtacgcaaataagtacatatatttgcattataaaaaggaggatttatgagaacagccaattacacagatttaagagccaatctaaaaggttatattgactcggttattgacgattgcgatacggtacttatcaatcgtggtaatggtacgggagtagtaatgatttctttggaagaatataattctttgaaagagaccgaatatatcatgtcttctgaacagaccatgaatgatattcgtaaaggagaagaagacttaaaggcaggcaggggaatagaagtaaatttagatgaactatgaaactgatatttactcctattgcacaagaacattgggaatattggaaaaagaatgaccccaacataaccaaacgcattaagaaattactcgccgatatattggaacatccttacactggtataggtaaacctgaacctctcaaatatgaattggcaggtaaatggtcaagacgaattaattcagagcatagacttatttattctgtgcataatgatatgatagagatttacatattctccatgaaatatcactattccaagaagtaactacattatcacatcttattaattaaaaggacatctattaagttaggtgtcctttttctgttttacactttacaaattctatgacattatggataaatctaaaattgaaaatgctatcaatcatatcacctctttacaagagaaattatgctactgtgaaaacaatctgcaatatatcaaacgcttgcaagcacttaaatattggcgcacaagtttgattcatttttggataggaacagcagacagcatggtgaatatgcagcagtttatgaaagctacttccatacttgttgcggattctcattctatgatagagtatgcaattcaattcttgtttatgaatatggcgatagaccattttaatacttgatattatggatatagattatactgttggagaagtggaactaacttacaaatccacttcaaaaagccggagcaaaatatatagttcggaggacgcttacaaggtcttactccccacatataaggagggtacaatctgttacaaagaatacttcaaagtcttgtttctaaaccaagccagccaagttttaggctacactctcatatcagagggtggaattactgaaacttatgctgatgtcagagtaattctacaagctgcattactcaccaattcagtagctatcattcttgcacataatcacccaagcagtagcatgaaaccaagcaggcaggatatggagattaccaagcaggtcaaggatgcagcccaacttatgaggattaaagttttagaccacctcatattaacagatgcaggatattacagctttgctgatgaaggacagttatagagtatcatcctaaaaaaggacattcaatttttaagttgggtgtccttacttacataagctgaacgaacattcagcacttgtaaccaactattaataattgtgaatcatgaagacatacatagcatatctaaggcaatccactatgaaacaacaaatatcgggtcttggtgtagaagcacaacgggagattatacacaatcatgtgaagcataagcccatacttgctgaatatattgaaacggagagtgggaagaaatctaacagacctcaacttcttgcagctttggcaatgtgcaggaaaacgaactctattctgattgtcgctaaattggatagactgtcaagaaatgtagcgtttacttctaagctgttggaaagtgatgttgagattgtgttctgtgacttcccacaagccaacagattaattctgcatatcatcagcagcatagccgaatatgaagcaggattaatcagtcagagaaccaagcaatcacttcaagctaaaaaagcaagaggtgtgcagcttggtaaatcggagaacttgatgaataaatttgaacaagctgttcagaatagtatcgttaccaacaaggctaaagcagataacaatccaaataacatgagagcgatagcactgttacggtcactcacaatgcaaggtaaatcattatctgaaatgacttgtctgttaaatgagcaaggctttgttacatctaagggatgcaagtttcagattacacaagtcaagaggttgcttgtcagagcagggttgatgtcgtgaagccgctttgaaaggcaggacaaatttagagcaaggtcagtcttatatgccccaatctaaatttgtcccacctctaaattcagtccgagaaactgagtttaactctacaactcatgtgggtaacaatttctaaaattcacttcttataagggagttttcattttgatacccgcatggatttacagagtatggatgcaaatcttattaaatatcccgttcagaccatgtttgagagcatggaagttactattaatccacacttcatgcctattaatttagaacctttcgctatctttgcaccaattccaatgaactgatgcgtcaaggagttggaaggacatatttaacgaaaggtgttattgaaattatcttcttgtaacaaatctcgcaaatttgaaacgctgtgaagatgatagcagtagcacccacacttggatatatacctacctcatttttgtgaggtttctatatgccctttggtgtgggtcgctattgttttatccacagcaaaggcaatgcgagagccagttacaaggataaagcaaatagtgttcccacatctttttttatttatggctcattgtagggagcaggtgagcataaaggtgcaaatatgaaaacctacttactggatattcttaatagatataagaaatttagcgagagtttagatgtagaagccattctttgctctaaatcatggtctgttttcaatgactccggttgcaaagagatatacttatttcagcatgacggtagtctgataatctctgtaagtggagaagtaactaatgctacatggaaatatattccagtaaaccaatctattttaatcagcacaaagagtgcttcgtatatgttgcatcctgcgtttgttgatgatataatttttgctttgcagttggacggaacaaatcaatattcttttatgattgatgaattgcaaagagatacattcgctcccaaaagtttatcagatattgagaagtactttatcacaaaaaaacaacttgaacttgaaaaggaaaaacaactattagcacaacgtgcctatgataaaattgttgcacgtgagcgacaagaacaacagagaaaacaagaagcggaagaggctttaatagaagaagctctaagagaaagtaagctttatcaaacagttctttctattgcatggatacagatgtttctaattcctatcattctaattccatgctatttgttttctgacgagtttaataacaatggttggaaagacagaataagtcttattatggttcttgcctttttaggagtactcttgttcgttattattagcttttttatccttgacccgattaaaaacagaatcataaaacggattaaagaaaacaatattcataattcctaatttaatagctaacttgatatgaaaatatttagattattgacagctttattattgattgctgtatgcgcaggattgggttcttgtggcgatgatgaattagacacaaagccattggaaccagttatagatgaaattacaattagtgatacttctttcgattttgaagctaatggtggggaagaaacattgtctttttcaactaacagagattggactgtaagccttgccaataccgctaatggtgagaattggtgtacggttactcctttaaatggaaaagcaggagataacaacattcaaatcagagtggcagcaaacaaaggctatgatgataggaatgtgtctcttaccatagcagcaggtggcacaagcagaactgttatcatcaaccaaaagcaacaaaacgctttaacccttacagcaaataaatttgaagtaggtaaaaatggcggtaaaatcaatgtggaagtaaaagctaatatccagtatgaagtaattatatcggaaacatccaaaaattggattagccaatcagctaaaacacgtggattaaccagtaataatctttcgtttgatattgcaccaagcgaagaatatgataaacgaaccggagaaattataatcaaaagtggtgaattttctgaaacagtccatgtgtaccaaagcggagaaggtgttctgttgctcactaaaagcgagtattcagtgagtgacaaaggagaaacgattgctgttgatttaaaaagcaattttgcatttgatgtcaaaatgcccgatgtggattgggtgcagtccgcagcaaagactcgtggaatgtcaagccataccctttattataccattgctccaaatgaaacttatgacagcagagaagcagagattatcttttacgataagaacagtgcagtgaaagacactttgaaaataatgcaagtacagaaagatgctattattataggaaagaaagaatataaaatatctgccaatggagaaactgttggaatagaattaagttcaaatataaactatgacatatcactgcccactgattgcagttggataaaagtgattgataaaccaataacaaagggattggaacagcatattatttatttgaaaactgataaaaatgacactccaaatcagagaaattgcgagataataatctcaaataaagcaagtaatattagcgaaacgataaaaatcattcaagagagtggaggttatgtacatattcataataaactatatgagatagtaggcgaaacgacatccgtccatatcgacatagatgcaaatgtttattatactcctattgttccggctgaatattattggataaaatatgttaggtcaaatgggaatagattatactttgacatagaagaaaactattctaatgaaataagaaaagggcatatcataattgatagtcctgctatcttgaaacaagacactattcagattattcagaccccaaaatctaattggattaagaaaaccatacaccttgatgtagctggaactttagaaaatctgataaatagtgagcaattatttcaaataaatgaattgactttaactggtagcttaaatgatgatgattttatagttttgaatgacatgacaagtaaacgaggaaatctgtcttacttggatttagctgataccgatgtaaaaagtttaatgaataaagctttttcatggactctttcagaaagctcactaagtgatttcgactccaaattaatatcaatcatactgcccaaaaattgtaaagaaatcggttgggaagtttttgacggatgtacaagattacaaatcgtttctttgccaagtacattagagaaaataggaatgtttgcgttcgcacaaacagctataaaatcaattaacattccctttaaagtgacatgcatagaagaagctacatttttaatgtgccaaaatttatcatctatcactatgaaaaatgtggcttttattggcaataatgcgtttacccaatgctccaatctatctcaaatagatttaccgaaaagtcttgtaacaatagaacacaacgcattctcagatacaggaatacagcaggtggaattgcctaatggatttactgaattatctgacaatctttttatgggttgtacgaaattggaaaaagtaattttacctgcaagtttaaaatttatgaatgatggctgttttagtggttgtgagcaattaaaagatatttatatttatgctccaactcctcccagttatcgagacatttatgacgatgcgtttagagatgttcttcttgataattgtgtgttacatatatccaaaggaagctatgcagcatatcgtcatgccgatggttggaacaaatttactaatatagtcgtggaagaatagtagcaatattaataaatgattccaatttgatattaagatataaaaggcggcattgattatctttgccgcctttatttatgcattttcatgaataagcagtatataacagctataatgtgtttcaattaataatagtaccttttttagtgaaagttagttttatagaccccaattcaaaaaagtactatgcttactttgaataactatatggatatttgaaacttcattttataattgctatttttgcaatgcaggtttattctgcaaaagagattattaaattattgtcaaacacttcttgtttttcctccaagttaaaccaagagttaaaccgcttcatttaagcgaaaagtagatataagctaatcaatttaatgccagttatttaatgatgatattaataaggttagcgcacctgctttgggagcagggggtcgtgggttcgaatcccgctaccccgacagaaattaataagctactgatttttcagtagcttatttttgtatataccctctttcccacttatccaaatagcagcgtaaagcaactcccttttcccacagcagactgcaccgtgatattccctccatgccggttcatcacttgtttacataaactgagcccgatgcccgaaccggaaggcttggtggtgaagaacggtacaaaaatcttatcttgcacttccggcagaatgccttcaccattgtcactgacagtgattaggcattgccacgagagggcgggtagcatcttcacttctatccggggatgctctttcctgctacatgtctctttggcatttttaatcagattaatcagtacttgttctatctgtgtccggtctatctggagtatgcggtcggtctccggaagctctatccggatatactcttccgaaaacagcttctgcaaatcctgcaacagctcgcggacggcaaccggacgacggacgggggcgggaagtcttgtcagcttccggtaattctccacaaactccaacaaccccttactacggcggtggatagtctgcattccctgccgcatgacgggatagttcttttccgacatttcccgctcgctcaaggtttcggagagggagatgatgggagtgattgaattcattatttcgtgcgtcagcacacgtatcagcttttgccacgcttccatctcattgcgttccagcacgcgggtacggaaattcctcatcgcttcggaaagctcgtccaccatatcctccatagaccggttcttgtagggagaacggaatgacagcatcatgtcgtcatagcgcaggctctctgccagatggcgcatcatgcgcacctgcatcatctgcaggcggtacagatgaacggcaatcgccagcaatatcaaaaaagccatcagtgcactgaaccacagtccggcatccaccagcagataaacgccgaccgaaaggaaggctatgccgatgatgtgcagtgccacaatcaatgaatatcgtttcataagcccagtttttcaagtttccggtacaaggcgaagcgagtaatgcccaagtattcggcggcacgggtcacatttccttcactgagccgcatggcacgttccacagcctgccgttccaattgctccaagttgaggacttcttcttccttcttctgacgggaaacagaagcttggaacataaagttctccggacgaagcagagaaccgtctcccaatatgacagcacgttccactgtatgctgcaactcacgtacattacccggccaggcatatttcaacaacttgtttttcgcctcccgggtcagcccgcgcatctctttctgatatttgcgggcataccgttgcaggaaatactctgccagcaggaggatgtcgtttccgcgttcccgcagaggtggaatatgcaactcgatggtgttgatgcgatacagcaggtcttggcggaagtctccttcgtccaccagccgacggatgtctgcattggtggcgcagatgagccgcacatcaatgggcgtagcctgcgtacttcccaaacgactgatacaacgcttttcgatggcagtcagcaatttggcctgcatgggcagggaaaggttacctatctcgtccagaaaaagcgtaccgccggttgccacttccatacgtccagctttcgctttccgtgcatcggtgaaggcgcctttctcgtagccgaacaactcgctttcgaacaactgttcggggatactgccgaggtctatcgtgacaaacggctttccatagcggggagaattgcggtaaagcatacgggcaatcacatcctttccagttccattctcacctaatataagaatgttggcatccgcatcgcgcaacttctccacagtagagaaaacttgctgcatgacgggagaatcaccgataataatctcttcggagcctcccgttgtggcattgctcagtacttccacctgctctttcagcagatttatctcggtgcgcgaacggcgcaacttcatgcccgaagaaagggtcgccaacaatttttccttctcccacggcttgggaatgaaatccgtagcccccgctttgatggcacgcactgccttgtccgtatccgcgtaggcagtcatgaagatgaccactgcttgcgggtcgatactcagaatctgcttcaagctgtcgaaaccttcctgaccactgatggcatcacggctgaaattcatatccagcagaataatgtccggacggaaagtggtcataaaatgctcgatgcggtcgggggtcaccgccacctttatcttctcggcgtagggttcgagaagaaggttcagtgcaaaaagcacatcctcgttatcatctacaatcaatattttaccaaactgctccatatctgttttcttttcgtgcaggcaaggcctacacaatcccacatctcttgtacgggcaaagataagtataatatccatgtgttgtgcgtgcattatcgcactatttttgtgcgcaactgcacacgtttggaaagcttcgaaccacaacaaacacttataatacaataacttatacttatggcatagaatttgaactttatagagtaaagaaaacaactatgcaccggaatatatttttattgcttattacattcagtctgacgtcgagtgccgttgcccaagagcacacgttggagctgactttggaagaaaccatcgagcaggcccgccagcagtcgcccgacgcccaaaatgcccgccatagcttccgttccgcttattggaactacaaatactactgtgccaactacctgccgacgctcaagcttacttccaatccctatctggaccgtgctatcaacaaagtgacccaaagcgatggcaacgtcaagttcatagagcagaacctgctgagcactgacctaacactgagcctgacacaaaacgtgccgtggaccggaggaacctttttcattgaaacggctgcgcagcgcctcgaccttttcagcagtgacacctattcctggcagacttcacccgtcaacatcggatacagccagtccttgtttggctacaacagcctgaagtgggaccggcgcatcgaacctatccgttatcgcgaagccaagaaaacctacgtagaaacccttgagcttgttgccgccaatgccacagagaagttcttcaacctggccaaagcacaaagcaactacgaaatagccaacgccaactacgccaatgccgacaccttatatatatatgcgcaaggacgatataacatcggcaccatcagcgaaaacgaaatgttgcagctcgaactcaacaaactgaccgaagaaaccaactgcatgaatgcccgcatcgaagtggaaaactgcatgcaggaactccgttcctacctcggcatccaagaagacctccttataaaggtgagaatagacaaccgcgtgcccgacctgcacatcgacctggatgccgcgctgatgcttgccaacgaaaacagtccggagatacagaacatgctacgccgcaaggtggaaagcgagagtgccgtgtcgcgcgccaaggccaatgccggactgaaagcagacatctacctgcgcttcggcttgacacaaactgccgacaagctgaaagatgcctaccggaatccgctggaccagcagtacgtcagcctgggcattaccctccccatcctggactgggggcgcggaaggggacaggtacgcgtagcgcgttccaaccgcgaccttgtctacacgcaggtagagcaggacaagacggatttcgacttgaacgtgcggaaactcgtaaagcaattcaacctgcaggcgcaacgggtaaacatagccgcccgcacggaccatacagcccaacgacgcgccgaagtagcccgaaaactctatctgctcggcaagtcctcggtactcgacctcaatgcatccatcacggaaaaagatacggcccggagaagctatataacggctttgtacaactattggagtttgtactatacactgagaagcatcacgctatatgactttgaaaaagagaggccactggcagaagacttggaaagggttactaatgaagaatctatacagtaataaaatcgtggaatagttttagtaaaagctgaccggagatttactaaaactccggtgacgatttactaaatctccggtgaagttttagtaaaactcggaacccttattcagaagaacttctgaagggggtatctgaaaagtaaaaaaagagtatataaaatattgcattatggatataaaacttgaaaagaaaccctggtacatccgttaccgctactatctggcgggaggcgttgccttccttgccttcctgatttatgtagtcaccctttcgctgggtcccagcaaactgcgtatcgagcaagacaacatacagatagccgaagtcaaaaacggcaaatttatggaatatgtagatgtggagggagtgattcagcccatccttaccatcaaggtcaatgcacgtgaaaccggaagcgtggaacgcatcataggagaggaggggagcctgctccggcaaggagataccatcctcgtcatggaaaaccccgacctgctgcgcagcattgaagaccagcgcgacgactgggaaaagcaacttatcacctaccgcgaaaaagaaattgaaatggagcagaaaagcctgaacctgcaacaacaagccctgcagaccgattatgacctcaaccgcctgcgcaagagttttgcccttgacaaggaggagtaccgcatgggcatcaagagcaaggcgcagctcgaagtttccgaggacgaatacaactataaagtgaaaaatgcccatcttcaaagggaaagcctccgtcatgactctgccgtcaccgtcatccgcaaagacctcatcaggaacgaccgcgaacgggaacggaagaagtatgaacgcgcctgcgaacgactcggcaacctggtggtgaaagctcccgtcgccggccagctcagctttgtcaaggtgactccgggacagcaggtcgcttccggcgaaagcattgcggaaatcaaggtgctggaccaatataaagtgcatacttccctgagcgaatactacatcgaccgcattatcaccggattgcctgccaccatcaattatcagggaagaaaatacccgttgcgcatcacgaaagtggttcccgaagtcaaagaccgcacgttcgacgtagacctcgtcttcaccggtgacatgcccgacaacgtacgtgtaggcaagagcttccgggtacagattgagttaggccagccggaagaggcgctcatcatcccgcgcggcaacttctaccagagtaccggcggacaatggatttacaaactgaacgccacaaggacaaaagccgtgcgtgtgccgcttggcatcggtcgccaaaacccgcaacaatacgagattacggaaggtttgcagcccggagattgggtaattacaacgggatatgatacctttggcgaggcggaagaattgataatgaaataaaactacgcactatgagacaaataatcttagccatcaatgcattgctgaaattcaaagcatacacccttatcaatgtattgggactggcgtgcagtttggcttgcgtactcaccgtagcccgatatatccaccaagaaaatacagtgaaccaatgctttcccgaatataaacgcatttgcctgataaaaacctctaccagcagtggtgagaacttcttgggaggctaccggtcgggattggaaaagaatcctgacgtagaacaatttacggtgatttatcaaatatcggatatgcccgctctgttcggtgaacaagaaattgcagcgaacgctttttctgtagacagcaccttcttcaaaatctttccatatagggtgattgccggaagcggaagaatagtccgcccgagggatgttgtcatcacccgttctttttggaagaagaagctgggagggaagaatgccataggcgctactttcaaaaacacaaaagggaataaattcactattataggagtggtggacgaccccgataccaagacatcatggatgccggatatatttatgtcggatgaactggatgaattcctttttttcgaccctatatacgccatgctgatggcaccggatacagacattgcactgctgaataaaaagtattcaaaagaacacccccgcagcaaatggagcacttatgagacagtacgctatcagtatttgcctttgaaagatttatattacgataaagaccacggaaaagaaaacaagaactatcaatatggcaaccaaagctatgtccgggtattgatggtagtagccttcctggtaggtatcatagggctgctgaacttcatcaacatctacactgtcatcatgtccaagcggtcaagagagtttggggtgaaaaaagtgttcggtgcaggcaggacagacattttcctgcaaatatatgccgagaacatcttattgacgggactggcattactcctttgctgggctttaatagaaataaccaggtttttctttttccatgaactttatatacctaccacaacagactccggctttgaccggaaggtctctgccatcgtacttttaggattgccattgctgactactgtttatccgttcttgaaatacacatgtagcagacccgtcaactccatacgcgagctggcatcttcacgcttttccacacggtcacgcatgatattactgtgttttcaatatgtcgtaaccatctttataataaccgtttctctattctttgtacggcagttggagtatatgctctgcgccgacctcggtttccgctcgcacgatgtgataacttgccggatgtatgtcgataaattgggcttatataaaacaactaaagaggagggattggatgaaggaaaaagacaatatataagtaatgctttggtcaataaacgaatgagtgaaagcactctgtttgagcattggagcagaggaaacgacttgctgttcaccgacttccgttttgacagttttgcgctcaacagagccgaaaacggtttccatccggcattatctgcacatttaacgacccactccatggcaatatacgattttcaacttgtagaggggcgcctatggaacgactccatagatgaagcgttcaccaaaaacagtttcaaggtaattatcaacgaaaccgctaaaagagtctatggaataaaagacatcaccaaagacaagctgcaacctgaagaaccacactacgcctcaagcagcttaccggatttctacaatccaccttgcgagatagtaggggtcataaaggatttcaatgttcggcacctttcacaatccatccaaccggttgtcatctattatcacgatgcaagcataggcggaatttatactgttacagcctcgtataagcacgagaataaagccaaagtcattgatttcctgcgccgcttatacgaagaatctacgggaagaaccgactttgaatatacgctgatagaagatgaactccaaaagatgtatcgtgaagaccgtcaagtggtgaacatttatacgctctttgccggaatagccattttcatctcttcattgggattattgtcaatatccttgttcgatattcggcaacgttaccgtgagataggtttacgcaaagtgaacggtgcgcaagcaaaggatatttaccccttactcattaaaaagtatctctcggtcatgggagtcgccactttgctatccatacccttgtcatggattgccattaccctctatttgcaggattttgcccacaaagcccctttgacattcgacttgtttgccgtagcagtagccataacaactgccatctccttgttgactattattaggcaaatcagcaaggctgccaacatcaatccggcaagcattatgaaaaacgaataaaagacacgaatatgaaactcatactattatatatccgaacattaagtaggtttaaagtatatacggtaatcaatattatcggactggcactgagcttggcttgtgtcattattatattccgctacgtgaagcaggaaaatgatgtagattgttatagtcccaacaaagaccggataggcatcatggtgcaggaatacaaagatgacaacaataaaacggcagttatcggaggtcccctcgaagatgcagacatagaagcgatgtccactttcgtatggttcaataaagactatatcataaaggaagaaaaacatattgatgtagaaacgattgtagcagacagcttgtttctaatagtgactgattttcccatgaaatatggaaaagccgaatcatgggcggcgtctccacaaaccgcctttatcacagaagagctgagtgagaaactattcgggaacataaatcctatcggcaaaaccattgaatactctaccggtgaccctcttacggtgaccggagttatcggcaaagacagagggaaacgctcgcttcatttcgacttgcttgttcctgaaacattgcagaaggattgggagttccgtttcccgatgaaaatggcattaattcataaaggggcctcctttacgaagataaatgcacggcatgcagcgttccggcaatctccacgtgctgcggatgttgaattcaggtatcaactgcttcccatgcgtgaagtgtattttcatccagccattgatgtttggcaggacatgctgcaaagggggaatttaccacagctacatctattggcacttgttgctgtactaattttaattgtaggcatcttcaattttatgagtctttatacggttgtattattgaaacgaagcaaagaattcagactaaagaaggtttttggaaacaattcagcacagctattctcccaactatatatcgagaatttatgtctgacacttgtatcattatttatagcctggttccttgtcgagatttccgtctttcccttaaataaatattttgatgtcattcaacaacctaatggtatatttgacataggaataaccatagctatcctgattttacagccattgacagcttcaatctatccgttttttaaattcaaatacaacacgcctatccattcattacggaaaataggcagtggtgaaaaatcgtctgttgtaagaaacctctatctgagtattcagtatatcgtggcattcattctaatagttgtttccatgttcttcgccaaacaactgtatgaaatgactcatatagatttaggctatgacacagactctatcgttaaagtccattttgaacgctatgaacgcaaacagcctaccactgaagcagaatatctgaaacagacctccttgcgcaaagcctccaaagaaaatatatccactgcaatgaatgcctctcctttattcacggcatggaattactctttatccccttatgaatatttcacagaatctccggtacttttccgtaagctcggagaagccaatttcaaacaattgtattgcattcccataacagaagaagaaataagatttcatggcttccgtttatcccagggacgtttatgggatgccgacatcgaccatgaaggtgaagcaaaactgattctcaatcaaaaagccatgcaactcttcggactcgaaagcgcaatcaatgcccggctggaaccccaacaacctttatggccgcgtagggatttgagcccttatcagattataggtatcgtcgaagatttttattgcggacatttatcccaaccggttcttcctatagcttttatatacggtgaaacatatctttcacaaattcctttgcaagctaaaattgctccaggacatcaaaaagatgccgttgccttcctggaaaacctacacaacgacaatgctgatggagccttcaattatacttttgcaaaacaggaagttgagaatctctataagtcagacaagcaaataactattacctattcctttttcgcctttatggccattctaatatcctcaatagctttgtttggattgtccttatttgacatacaacaaagataccgggaaatagctatacgaaaagtacatggcgctacacataaggaaattttattgttattactcaaaaaatacattatcatattagcaatgtcatttttgattgccatttctatatcttattggggaataaccatttatctgagagattttgcctacaaagccaacatcagcagttggttgttcattattgcagcaatcatcatatcattaatttccatattaacattggtttatcaagtaaaaaaggctgcacgacagaatccggcggaagtaatcaaaagcgaataatacaataatgatactattatgataagacattatattaaaacagcattcagaaacctattaaagtacaaggcacagaatatcatctctatcatcggactgtcggtaggtatactttgttttagtatctgcctatattgcagccgctatataaattctaccgacaagtgctttacccactgggaacgcattgcagacataaacctatatactccagcagaagaaccttattccggaactcccgctacgttgtttgagagtctgcgccaattgcaattccaagaagtagaagcatttacttttgttgcctatccccgcccacgtagctacaatgtggaaactatcgacaaggaagaactgccttacgaagatttatatgctatggaagtagatacagcctaccatagcgtgttcaccccggaagtattacaaggttcatgggctgtagcatcgcaaactcccaatgccgtgatactgacacgctctctggcacacaaaatatttggtctcggagagaatccgataggaaagcgaatgaccttagcacaacggcttttctcttcacctgataccacaccacgaacaggaggtaccatctataccatacaagcgataatagaagatattccattgaataccagccttagctttctccaaaagattgatatgttaatcttgaacgacagcgaaggacttatacaattcgatggacgagacagtatgaccggtggacttacttttgctcttcttcgtccgggcaaaacatccgcgcaacttgaagcaagtttccgtgcaatggacttgaagcacacaatattcaatgagaaaaataccgtatcagcctcgaatttcggaaaactttttcgggagaaatccgttgccccttactttgccggaatcacattcattgtcggccttttgattctactgactggtctactcaacttttttcattttttgacggggagttatctgaaccgttcgcacgagttcggcattcgtaaagtgaatggaagtaatggcaacaaactattttggttactttttacccaagccattatcatttcgttcatagccttcttattgactttctgtctgatagaaatatttaccccttacctttcattctctttatttgatttcacattagtcattgaacgggacctattattgatacagacaatagaatatatggcaggcgttattttactatgcttattactctgcttgtttaccgtatggaggatgaagcatgcctccatccagtcaagtatttacaagaacaaatccaaacgccacaaacagaagatacgaaattgtcttttgggtatccaatttttcatctgttggttattcatagtctttacagtcgctttatatttgcaggctaacaagaccggttccacactgttcaacacactgacagaaaaagaaaagtccgaaatcatcagtattcctatggattaccgttttatgaaaaatgacgaaaagcttgctctcatagagcgcatcagtcaacatccggatataaaagataaaatgctgacagatattaattatctgaaaggtatttcgggaacaagcatgcagacagaaaaagataaccgggaaagtagccttgaagtcaatataatgaatgttcctaataactttttcgagtttatgaatatccccattctctccgggcatgtcctgaagacaaatagtgacatggtagcagaccgtaaattggtagaacgtataaagaaggatttactgggaaccaccttgtacaattatcaagatagctacacggtatgcggcatttgttccgattttgtagccgacacttacaatcagagccagggcttcgtctttctgccttgtgatttcaaatattatgtaggtcattgctatttgaagtgtgtacccggaaaagcagaagaagtagaggctttcgttaagaaaatgctggaagagaatcttccaccgagtatacaattacacatttcgaccttgcaggaagacattcaccaagcgcaagccatcgagaacaacatgaaagggataatcttattcttctcatttgtcagccttataatcactttattaggcgtctattcggcaatcacactggatacggaacgcagacaaaaggaagtggcaatccgtaaagtaaatggtgcaggattgaaacagattatcatattgtttgcccgtacgtatatttatcagcttgtactctcggcaacaatggcatttcctttatgttatgccatactgcagttatggaaaaacatgtatatcgtattctttaatgatggcccgctattttggatttcaatcttcataatcgtagctgtcattactactctgactattattttccgtattctgaaaatagcaaggacaaatccggcagaagtcattaaaaacgaataagaaaatatatttacctaaagattatgaccatacttacaatcctaaaaataattacccgcagttggtggagaaacaaagttttcttcttcatttctatagtcagtctggctatagggctagcatgtacaaacttgctgttcacctattatgtacatgattacaatatagagagtggcaatcgggacaagaaccgtattttctgtctgcgtcaggataatccgatgcaggacggaagcaaggtggcctatgctgatgccaatattccccctatgctgaaagaaaaatatgcagaagtggaagactacctgcgtatcaattctctggttccacaatattgtaaatatggaggggagatttaccacgatataacctttatatctgccgatactactttgcaacatttcttccactatcatcccattgccggtagtttaaagcaagtattggaacaaccgggcaaagtagcactcagtgaagcttttgcacataaactgtttggagataaaaatccattaggagaattgctggaaataaaaaccatgactgatacccaaagttatgaagtggcagccatattaaagtcacggtcacaatcattgctccaattcgacatgattaccgggaataacaaagacttttggggtggaatgacgtttctgaaactaattccaaataccgatgcccaacagtttaccgaaaaaatcaaccacgacaaaattcccactttgattccggaaaagacacaatattacgtcgaccctctgtccgacatctactttactacaccggactacgatacacaacaacctctgccgtatatcaatcaaagtaatgtgcaattattgtatatcagccttgctgccgccttgttggtacttatcatagcctgctgcaactataccaacatgagcctgagccgtgtattgcaacagctcaaaatgatacatgtggagaaactgatgggaagcagcttgaaggatatccgcatccaactgtttggtgatgcattcctcactgtgctgctggcattcggattatctttactcatcatcaacgactgtctgtcttttttcaatggattatttgcatcccatttaaacgtacatttctttttcagcctacagatgctacccttgttagtgctctttgtactagttatgtccattgtccctgcctggtatatcagccatagactttcacaactctcattcagcgaatacaagacactttacggaggtaaaaagaaacaacgtttcatagctttgctggtcattcttcagttttccatttctatagggctgatattcgctactctcgttgccaatgaacaaatcaatctcatcaaggaacgggcctactgttacgaaaatcggattgaaataggagatttcaatgccgcaccggctacaatacttaaagaagagctggagaaacatgtacaaggaatagagtccatcgccctgtcacaaggctccatattgaattcatggatacgtgagctatccatcaaacaagccgacggtacggaaaaaagttcctacctattaatgctgtatagtgatgccaatctggtaaaaacgatggggttcaaactcttgtccggtaacgctcccgaacaactgcaaaaacaatatgcctatcctgcactggtcaacgaaagctatgtcagaatgctgattccagcaggaataaatgccattggaaaacctttgaaagaatttgaccagtctgccgattctttatacatcatcggcggtgtattagaggacttcccgttcagttcattggaaaatgaaattaccccggtcatactttaccttccacctacagagagaatgtcgggtgccaactatctgcagattaagctgattgaaagcaataaacaagaaacactacatcaaatagcccaaatatgggaaaagatgaatgaaggggagatatttcaatacacagacatgcaccaagactttatgaaacgcaatggtaaagtcttgtctctctccaaactccttatcgcctattctctgattggcttgatattgacctgcttcggcttattcggcatttcatggtatgccactcgccagcgtatccgcgaaatcagcattcgcaagattcatggagcaacatcccgacaaatcgtgctgttgctgaataaaccattctgcctgcaaattctgcttgcatatattctagctgtccccattgtctattggctcatgcaccattggcatgaacagtttgcctataaagcccccttcaccgttatggactttctattgccactatgtattgtctggataatatctgccgtcacagtgtgtctgcaaagttatttgctgaacaaaacaaatccgattgactgcatcaaatccgagtaagaaatgaaatatttataaaccataaaaaccaaagcattatgattaagacagtaaatttacagaagattttcaagaccgaggaagtacagactctggctttgaacgacgtaaacattgaagtgaaagaaggggagtttgttgctatcatgggaccttcaggctgcggaaaatccactttactgaatatcctcggtctgttggacaatcctacatccggagaatattacttgaatgggacggaagtatccaaatatacagaagcccaacgtaccaacttgcgtaaaggagtcatcggctttgtattccaaagtttcaacctgattgatgagctgaatgtatacgagaacatcgaactgccgctactctacatgggcattcctgccaccgaacgcaagcgccgggtggaaaccgctatggagcgtatggcaatcatgcaccgcagcaagcacttcccgcaacaattgtccggcggacaacagcaacgcgtggcaatcgcccgtgcagtcgtatcaaaccctaaactgatacttgccgatgagcctaccggtaacctcgattcaaagaacggaaaagaggtaatggaactactgaatgaactgaataaggaaggcactacgattgtcatggtgacacactcacaacatgatgccggatttgccggacgtatcatcaatctgtttgacgggcaggtagtgacggaagctaacttataattcacgcttctcccgatttatatgcaggttgcaatgttttttccattgtaatctgcatgtttttttggaaatagctttccttttttttgtttctgtcgtccgaaatgcctaatattgctaccaataaactttttacttccacattttaaataacagaaaatgaaaacatacacaccgtcccctttgaacgcagaaaatatcactttaccggataatttgacggaactcacagaagccatggcacgcaatgtgcatgaagtatgggctttgggaagacggagagacacgcaatgatgaattaaagacacatcccggacttgtaccatacgaagagttaccggactcagaacgagaatacgaccggcaaacagccatacagacactgaaactgattatgaaactgggattcgacatacagaagaaataataatccaatatctattatagtactatgaggacgagtgagaacaagtattatcctatccggcactggtggaaattcgtgattcctgcctttatcattctctttctggttgcagcattgattgtgacatgcactacattccaaaaccttattcaattctttccatcgcgtggaatgacctacctgatgacactccatgccatcatttcccttagcgtatgcatctgtttttttctatgtatcaagagattaatagatgtattctcattgaatctggaacaagaaagaaacattcttgcatccttgtaccaggaaaaagaaaaacgggagattatcaataacgatgagaaagaaatcaataaactgaaagagaatatcagaaaagaattgaaacaagaaactgaaaaaaaggaaactgcctaatgacaaaacaaatatgaatctgctaacaagactttttgcccttcattttgaccgctctttttccggaaaaggatggaggcagcttgcttggcttttcggagtcatagtaactgttttcttattgacctcaaatccgcaactacgcgcctaatatgatacagaagcgaaaagaatctgcatcgttagtaaaaagggggcacagtgcatcgaatgtcaccataaagacatataaatgccccttaccccaccatgcgacttgaggcaatacgcaaaatcacgactataagttgtcggtgttatccaaagtcattctggaacacattggcataagcattgttgcatgaatagatattcagcacatacttccttgatgtcctgacccatttggctggcacagagatgaacttaaagacaaacgtcttgatgcggcttgttgctttgagtccgaacctcttcacgtcaagcctcgccatgatgaatttatagaagttgcgtatgagtgccataagcagaagaaacaccgtgttttctcccataaaggattttggaagcctgttccagccgaatccgttattcatatcatcgaagatgcgttccttccctccacggaggttatagaattcgacaatctctttctcggaagactcgtagtcatttgtaaggatgcagcggtaggtgtattctccttcccacaggtcgagttcgccgtctatccgcttctgtctttgaatcacaagacggtatgccttccctttccatttctcgatgagaatggaggccagctcaaactcaatgccgcccaattccactttcttccaacctctgagggcaaagatgtcattgtagagcgaactgcatcggttagcacggatatagaaggtcttgcagtgtttagcaatctcttccactatctcttcagaacacgagccgcaatcagctctgaaacggttgataataagcttgttttgttcaaacctttcaaagaacctcttcagcgtgtccttctggtggaaacggacatttgtgttgccgtcgctgttctcaatgccgacaatcaagttgccaataaccgccacgccagggcgataaccaaggaacttcttgtatgtaggcttcgcatcaaacttctcagcctctatgaactggtggtcgaagtcaacgtcatacccctcgccctctttcagctgccctgtggacaataggcaattgaggagcagtgtattcagcttgtctgccgtgttgaagtcgtaggtcttgccagtgtcggatgtgtaggaaatgttatcctgggtcagttcctttatggctctaagaatcgtgtcggcactgcatgtgcgaagtgtcggatgaagcgaaaggtggtacatcagatgagtggtgacatcctcgatgcatgagccgccacaaaaataaacgctcataagcgaacggatgatttcgctgtattgataaccatacagcctgcatctcataccgagggttgagtcgattacagatgagagtctggagtcaaattgctccattattgaaaatattcctccaaaaggagtgagtttctcggatttaattgctacctttgccatgtctgtcgggtttgatacatattttgatttgcaacactaagataggtgaaaaatctgacatggcaaattcctgagcaactttttgttgctcaggtacttaaaaagttatatttgtaatagtgttgcggaattaaggattgatatatctggtaagttttgcatttatctttcctgagccgtctcttgaagaatggaccggtattgataaagacgtacctatggggcgtttgcttcagttgatttgtctgttcatcgatccggggaatattgtggaagtaccaccttatctgcgttggttctctctattggtcgtagtgctgggattaattttgttctgcggattattgatatccgtaatctccaatatgctggaacgcagagttgagcgatatcgtgaaggcgatatcgtttaccctttgcaaaaccacatcgtcattatcggttttgacaacatggtccccactcttatccagcaaatttgcgatgacacacattatgggaattgccatattctgattcagagtacccaaccggcacaagaaatccgtagcaaaatccatacggaactggatgccaaaaacgaaaaaagaattgtggtgctgcgtgcccggcgcgactctatcgaggagttggaaaaactctatactaccaaagcgcgcgaagtattccttatcggagagaggaacgaacatgaccatgactcactgaacatagactgcctgaaaaagatagttgacattcataaacgatgcaataaatgttccctcataccattcaccgttcttttcgaatatcagactacttttgccgctttccaactgaccgatttgtctgccgaatggagaaaatatatagaattccatccctttaacttctacgagggctgggcccaaaagatattggtaagccggcaatacggaaaaggggagaactgcattgaatatcctcctctcgaccgtgagacaataacctacgaaagcgaaaaacatgttcatcttgttatcatcggtatgagccgtatgggagtggcaataggagtagaagctgcccatctgttgcattttccaaacttctgccgggacaagaacataaaaagtgtcattaccttcattgatgaaaatgccgaccgggaaatgaatttcttttgtggacgataccgccattatttcgagatatcgtctacccattattacgacatgagcaaggacgaaaggcacgagagatttgtccttcccacccgttttaaaggaaaagatgcagactttctggatgtggaattcgaatttatcaaaggccgtgcggaaactcctgccatccagaacctaattaaagaatgggtacatgactcaggccaggtattgacgattgccgtctgtctcaattatcctcctcaaagcatggcaatgggattatatctgccggacgatgtatatgatgaaaacatcccagttttgtccgtcaggaaacctccagtgcactgctcaatatgcttaacagtaaaaagaaagatgaagcgattcataaatattcccatgtttttccttttggaatgctggacaactgttacgacttggacaaaaaaagccggagggagggacaaatcatcaattatatatacgatttcaagaataaatatggaaatgtgcctcaatcatgcccacctgacaatgagctgaaagactcatggaacaaactgtccgtatcccttcagtggtccaatttgtacagtgcatattccattagtcccaagctacgctccataggcattacggatggttacgtgaaactggacaacgaccagataacattgcttgccgaagtcgaacataaccgttggaacatggagaagctgctgcttggcttccgtaaacccaccgccgaagaagaagagttaatctatggcagcaaggaaatgggagacatcttcaaaaagaaacgctttgtgcatcccgatatacgtccgtatgatgaattgaaggaaagtgtagctaacacttgaaaagggacccgggtagcatttgaaacgtgtaccacccgataggttttgcaaagttaattaaatttgtttatttatcatatcttgtgtttctttcattctgtacgattttcccgtcatgttcagtagaatcgccttgtgcgttagcctgtctaccattgctgtaactagtactttgtctgcaataatctcgtcccatctgttgaatgcgagatttgttgtaatgacggttgttttcttgtcagttctgagtgacagatggttgaacaacatctccgctcccgccttgtcacaagaaacgtatccgaactcgtcgcagatgaccatgtcgtatcgttcgaacttgttctcgagtgcccttagtgtcattgcgttccggcattcccttatctgcgtaagcagtctgggcacggaagtgaacagtacggagtatcccgcgttacaggccgcaatccccaaggctgtagccagatgggtctttccggtaccgggattcccgtatagtataaggttgcgcccttccttgatgaaatcaagtgtctcaaggtttggcaaggccttccgcgcttctggcggaagcgcgtccgtgtctatttcgttgaggtatcgcaactgtgggaacgcggcatttttgatgcgatgccgacgctggttctccgagcggttttctttttcctgacgcaggagttcggccgtgaacatccacaggttccatcgttcatcaagtccttgctgtataagcaggtcgatgtcgcgtcgtaccagagggagtttgaggtcgaaggcatacgcacgtatccgttcgcgtatggagtcttgattttcgttttgttccattgctatgcaatttttatgttgttagacggtaactttgtttacaggttgttgtgtggcgccacatccgatcatcgccgaaagtgtgtccaatgtctgtgaggccgattcttcaatggcggtctgttgtggatcggacggggtcagggtggctgcgtcttgacggacgtttgcggttccattgccgtcactggccagcatctcggcgctcaattgttcggaagacaggcgtttgagtccccgggaggacagacggtctgccgcagccagtatgtcggcataagtgcgctggttgtcacgggtaaacacgagcagttcgacaaacgatctgggagaatccgtaaaatgtttgcgaaacagtgccgccacgtccgggtgtacctgtcgcatggccgtggatcgtcccaacgccgcaggcttgcgaaggaacgtgcccagatagtgcatcaggtcgatacaccagtcaccgagacgccgggagcgtacatgcgtggctaccttgtcgcgaccgtcaagcacgacaatacgctcggaatacatctttatgggtacctcccgaccgacaagccggtcaggcacagagtaatgcacaccatcgacggtaatggtggaatacttcccgacacgggcatgccgctgctcaaagcagcccatgtcaccgtggtcaagcggccgcaaagccgcaatatcggcctgtacgcgctccttcttctcttgcgcagacatgttggaagcctccccgttgagcctgtcacagaccttgtcaagatgacactgcgcctgctccagcgaaccgaaacggacatcataggcgaaagcccgccggcggatatgttccaccgaacgctccaccttacctttctcccatcccgaacgcggattacagaaatgaggggtgaaacaatagtggagttccatgcggcgcagggcatcggtatgttcgcgctcctgtccaaggaacttcttgacggccacccgcatgttatcgtaggccattacttgcggcgtgccccccaaagcacggaagcagttgcggtgtgcttccatcagggccaacgtgtcctcgcgggagaacaggtatgcccgccgcaggttgctatggttcatcgtgaacacggccatgtgcagcttcgtcttgacaccggcaatccaaagtgtcagcacgccccagtcaaactcgcaccggaaccccggttcatactcctggcggatgaacgccgccggggacttggctggagcggacaccgccacttccaatgcacggacatactggcataccgtcgaataggcaatctctatgccttgatcgcgcaaccggcgccacatgtcaatcttgcgcatctgctgcttgcgcaatccggccgcggcattagaccggttgcgggccatgaagccgtctatcgcctccatcacctgctggttcatcactctgcggacacgtttgctgctgtcatagcgcaccggctgctgcaggtacgtgtccattgcttccgcatcggggttgtcaccgaccgcttgttcgaaagcccggagatacttgcgtacagtcttgcggctcatgccgttacgacgggcgatctcacggatgctcaatccgtcacgcctataggcgagaattatggaatctctttcttccatgtggtacatattatgaacgccattggtttttatgaatataccaattttgttcggttaaacatacccatgggtggggcactttttaaatgttgttccgggtcccttttcaagtgttagctacaatcctgtattgcaaaatctcattgacgaactggatttggttctggtagatgaatcctaatggtcaggaggatccttcaggtgaaaggctttataaaatgccgtagcttattagggcattttcatcttgaccacctccgatgtggcagaatgaaaaagtcccataagttcttgaagatacctgctacacaaagagcggtattatataacggcattttatagaacaatcgtttaacttaaaacaaatcacaatgagtaatattcaatatgcagtatgccacctgcaacgtggcagtggaagtgacagcggtatgtcatgccacatagagagaaaggatgcaaagggtaaaacatatgtgccggataatgccgatgcaaaacggacacatctgaatcgggaactgatagaatttccgcaaggagttgccaacagaaccgaggctattcagtatcgtatagaccatgctggtttacaccgaaaggtcggtaagaatcagaccaaggctatacgtatcatcttgaccggaacacacgagcagatgatgaagcttcagcatgaaggtaaacttgaccaatggatcaaggctaatctgtcatggctaaaagatacattcggtgaagagaatcttgtgtcgtgtgtgctgcacatggatgagaagacaccccatctgcatgccaccattatacccatcgtgaccacagaacgcagacgcaaggagcgtgagggtgataagaaatatgaaactaagagtggtccacgattatccgcagatgacgtaatgtctcgtggcaagctgttccaatatcagaatacctatgccgttgcaatgaaaccatttggattgcaacgtggtgtggtgggttctacggcccgacataagactaatggtcagtactatcgtgagcagatgttgaaatacgaagatgacatagagagattgcaggcagaggttgaaaaggcacgtgaaggtcgttccaagatattgtcattcttcggtacgggagaattggctgaagcaaagaaaaaactatcggataaggacaagcagatagaaaagttacagcaacgcatagctcaattagaacaggaactgctgcaactaaaggagcaacataaggccgaactagcgaaatatcgtaatggttacatggtggagattgacaaggcaatcaaacgggctgaagttgccgagcgaaagctcattgctcacgaagctaccatagaaaagcagaagcagcgtattgacacacttgacagaaaggccaatccgcatcgatatcgcctctcatcgggtgcaacactcacaggtattcgcatatcgcctcgccactcaaacataccaagccttcgcattcaaactaaggtggaaaatgagacctttgaggatgcgaagtatttcgagtggtacaatcctgttatacaaaagtatctgaatggtgagtttaccgaatatgaacttgtcaatgaaatctttgagccgtttgagcaagtgagccaggttcaagcccaactgcttggtgctatatttgagatgctttcaggtggtccagcacagactcatgttggcacaggtggcggtggttcatcatcggatatgccctggggagagaagaagaatgataataatctgactacctctagacgaaaacggtaactttggtcgctaacgaataaggaaactaacttttttacaagagaattgcagattttcggatatttcttcgtgaatctgcaaatccttttatatatttgtgtccaaatattgacaattcaaataagtcacaacaaatagaaatgtgattatgtttttagatttcattgtagatatagcagaagttggtaatcaagttactattagaactagtaccgagacaattgagggcgcaattgtaaaattgtcgaaagaacttatagccattcaaaaaacagatggttctgttattataaaaaaagattctgatatttcacatgttgagattcatcctacagtgacaaatgaaattggagggaaaatgcaaactaacgtttcaaatagcaatgtaaggtccggtattactttaatcaaaaacgacaaggtagaatcttttacttgtcatatttgtggcaagagcaaaacttcaaaaaaatatgctatcgaagtaaacaatccaaattccagaatatgcaattcatgctatggatggactttggcgagattagaaaacaaatagtatgtatttagattttattttagatatagctaaagtaggagatattatcaatatcactactaaagaacaaaccatagaaggtgaaataatgaaaatttcatcttccttaattgccattaaaaagacaaatggcgcagtcgttttttgtaaagatgaggacatcattgacctgaaattaaaagctacagataaatcaagcaaagaggtcaaaggctcaaatgactctactactaatgatagaacgagtgttgctccgatcacatctacccccaaagacgaacatccttccaagccaaaacaagcatttgttacaatcggaaaatacgagtctagttgggatcaaatagacaggaacaatctagtttctatcgtttctgaaatacaaaattcactgacggtaactgaaaaaaacacaatagttgcctcgaatgcaaatgtgaatgaagtaattcgacgctcatttcgtgtaagtacagatgaacaacctaagttgtctgtcaatacatatacgattattgagacttcgttaatgcaggatcttctgcacttttctatcggagacagtttaccagttgtaatatattatcatcagactccgcagtttgaagttaaaggagtatatctaaccctatccccaaacactattattggatatgtagatttgcttaagcaagcaattagtgaaggacattatcgtcaagcaaaagctctttgttatttcttacgttctcaatccatggggcaacaagcactttggaaaattggcaaattgatccaagcgatgaaatgtgtcaatgcctttatcaaagaaaaactagaaagcataaagtctgcgactaagattcctaagggatataaggaaattgaaaaacaactgaatgaactaatcaggaatggagagcacgcgaccgcaatatctaccattgatgaaatattagatcaaactttagttgataataaatacaaaagtagcttgctccttagaaaggcacaagcatattcctctataacagattataaaaacgctcaattagcctattcttcattgatagagtttatcgagtctgtaggaggtgagcctaagaacttaagtcatttatatacagaattagcccgtttacaagcaatggataaaacagacttaagtgacgcacaaaaatctgttgaaaaagcattgcgatataatccgcaaaacaaatatgcggcaacactgcttgatcaaatcaaaacaggttctttatcctctgtttctattgaaagttcatcaagttcagtctcagacaattctgaagatgataaagaattaatgcttgaaatagacgattccgcattaactatcagtaaaatgattgatattgatataaaagaacataagtttaatcatgatctaatcatatctaatggtggagttccgtcaccttcaattgcacagtctattcttgaagaagcaaaatcgtataaaggaaccgatctaggcgaaagatacccaatttacctagaagccgcaaaagccttcagcgagcttcctgttggtagttatgatttgtcaaattacatggagtctgttgccttttatgcagtctataaagctaattttctttttaatcagtttaataatgacataaaatcgtctaaacattcaaatatactatatctaaaacgactaaaagatagtgcttgtagttattacattgaatcacttaatttgttatcaaatactaatacaaacatgttaagcatgattctttgtaattatatcaaattgaatgtggcgattagcaattttgagaacaaccttgaagttgatttaactggaaatttcaacaagatatttctatcttgtatcaacagtcataaccaagccgtcaatgatattttgtggaaaacaattattgaagttggatccgcaagttctaaagcctggaatgaattatggtttaacagatggaaaggagaatggagacgtgagttccataatgcattaaaggacaacacaaaacgtcccgacatatacaacataattaatagaattaatggaacaaacattgagactagcttatcacctggagtctttctaaaaaaatctttatcatacagacaagaaaggaatgtaaacttcgccaattcgttgtcaaccgtagtaaaagaagaactaaacattcatcttttgtcttcaatccaagagaaatgggatgtagtttcaaaattaagcgatcttctcaatgaaacagaaacagaatcaaaaattgcagctgacaagattttattaattctaagtccttacacaaatagaaaccaagtagaaagaactaatttattaattcaagtacaaagaatcattgatgaacagcttgtttttatcaatgataacacaacgtattatggaaggacttttttctttccactcttaagtaagtggaaaagagtagtaatgaatgctcttgaaaagaaaatcgccgacacaatgccacagctggttgtattagctgaccctccgtatatagttgatcttgacggttccaaagtagtcaatctactcatcaaaaataaaggtgaaagtacggcagaaggatgcattatgattccaaatgtaattaacctcacaactggcgcatcaattaaaggcaagaatacttacaagaatgaaattccatctggtaataatttggaggtaccaatgaaattacctccagcaatgaacgaggttgaatctatcaagttggtaatgtcaataagtgcgatttatcaaggaaaggaacttccatctacggagtttgaattcactctggagaaagaaccggaatcaacattgaaatacgaagatattccatggaatgatggacctattcctgtagagcaaatgtttaagggcagaaaacaaatacttgaaatgttgactaaacactatacgtcaatagaaagagataagccctatatattatacggattaaccaggacaggaaaaagttcaatattaaaatatcttagaaacgcacttgataagaaacaaattactatatctggtgaaaaatattgtattgcaactttttactgggatttatcacaagcatccagcttcggaaatgctcatgatatgtgggagtacttgttgtttgaccaattcaacgagtaccttgaaccatatatcggagcagaaggatataaagaattaaatatgcctgagaggcctagggcaaaggaactcaataatgccttgacgttcttacagaagaagcatatttaccctatattctttgttgatgagttttctttcatcaaggtaatgatggataattcagtagtaaaccctgctttcttgcacacattaagacaattttcatttgaggcaaaagcgggtttcatatatgcaggaacatatgatgtagatgcattgcttgaagatccgaaatatggaattcaagggcagttggtaggttgtaaaaaagaacaaatcagtgagattgacaaagattctgcagaggaattgatccaagtactaggagataaactagtctttacaaaggaagctgtagatcatattcatcgactatctggcgatgtaccttattttgtccaaatgatttgcaaatattgtggtttttatgcagttgaaaataaaagatctataattggctaccccgaactagaacatgtaatcaaaattttgactggtgaaatttctccttcagaaaactcattagtcaaaactcttccggacaatgtattccaaaacaacatgtttagtccagcagaccctaaagaagtaaacgtattgataacaagcatcgttcattttaacagggagaacaaagaacatccaagaggtgtaagtatggttgagttgcaggaattatgggcagccaaaagagtctctgcatttacagcaaaacttgcagattctatagaacttttgacaaagaagagagtcttaaaggatgctctagatgaagatcttcctgtttatacaataactgtagatctatttagaagatggtggagcatccatcatcctgatataactgtagagattggtaccataatgtaattatattcgctcaaattaaaataattatgaacatcataccttttcaagttaaggacatatcgaatcctaaagagctttttggcagagaaaaactgctcgataatctcattgttgccgcaaaattaaaacaaaacaccaatattattggggcaagacgattcggcaaaacctgtgtattaaagaccgtctgcactctactgaaagaaaaggaagacatatcagtttatcccgtttatatagatataaagacatctgacataaaaggaacagatgccgtatatcgtcatatgataggcatattagttgaatcattatataataatggtttatttacagaaccagaaaaattcggtagtgtagagatcactccatgtgatgattggacagaaattgctgaaaagcttgaatctctctcaagcactagaatacaatctgtttttcaaagactagtatattggctttctgatttattagacagaacgatactcttcatgattgatgagtatgaatatctcttcaaatatgctttagactcaacatctggatttatgaagatgagaaccatgagtagtgatacattacctaatggctcacgacctttctgtttttggcttacaggtgcaacaccttgggatcaattaataagtgaagttcctggttctggtgaagcaaatacgatttcgggttatgagtatgtaacacctttatcaaaagaagcatttctgtctatgtgggagaatgaatgcaaattagtagaagatacaaaattgcgtgagactctacttaaaaacaaagaatttgcctacgaaaaatcaggaggagtaccattctacggcaaaaacgtaattggttcatatatatacaaaaataatgaacttcctgattatacaatatgccaaggttatttccaagagcttacaaataaagcattaaatacaggggaatattcaatattaaaagacctggcaattgcacctcgtaaagttcctaattctaataattttgaaagtcttaagaataaaggtattatatccttgaaatcaaaagatttgtatcatttgcctattggcttcttaaaggactttattattggagaactttccggcaagaagactccaagcattccggaaacatacaacttaatgaagtcaattacagacctcatagaattgataaacaaacaaagaatcaattataagaaaaaagtcgtatttacaccagtaatagacggagattctttagctgatgacttacgtacaccatgctatacaaaggatcaattatctgattttgcttctgctctctataaatattactacgaaaggcttaagagcagcagagacgaatttggacaatttctttatggaaaattcggcaagtgtgtagatatagcaagacattcaattggaggcggtcatgaaatggataatttcgagcaacatcatggacaattctctagagccgatttgtatattgagattatgggttctgctgatgaattaagtacctcccaggaatactataaatttcaggttgaaatgcttaagagattcaagctaacactggagacaatgtttaagagaattaaggaaaataaagcttaataaattcaagagatggcactcaacaaatttgcacatgcaatagatgttcaacaatttttcattgcaaagatccttcatacaactaatggaggatggatatgttctattggtgactcggaagtatttctccctggaagtcagctttataaagacatagaagattatgaatcgtatgctggcaagagtgttaaagttatggttcaacgtgcggacagatggagtactgttgtttctcataaagattacataaagaaaatctttgaacgaaaaaatattatctcaaatcttcaaagagggcaaaagttatctggcataattaaaggaataacagagaaaggttaccagatcaatgtaatgggtattattggattcatgcataaagaagaaatgtgtgaaccagataacaatggtattaatagccctattgaattctctgtacaaaaagcagacccggaaaactcaattcttctattaagtcaaaaattactgaaaacccaggaacacattgcctcaaaagaactggagaagattaatgcagaaagaatcagaaaagagtacatcactaaacttgaaattaatcaagtattaaatggattgataaaaagagcggttccttctggatatattgtagaattctctaatggaataacagctttattacgttcaaaggatataccatcaaagtataaaatagaagaaggagctagcatagatgtagctgtctcagaaatcaacattgataagttattgttttatgtaagtatatcaagattattagaaaacaaatggttaggaatcaaaaagattgttgatgacaatttgattcctaatgaaacaattgtaattggcaaggttgtttttcttgaaaaagaccttgttacattacgaatcattcttgataatactacaatctatggttatataaagagtgaagatttggcttgggaaaaggttcttaatgcctcggattttgtatatctaaacgaagatttagaggttaaatatctttattccgaccagcaaaaattcttttttgacctaaaatggcaatcagagaaggtataccctaaggaattattcgatatggatgttaatgaactattgtcaactttaaacattcatgagaacaaattcattgcaaaagtatcaaaattatacgacaacaaaacatcaaaatctgaacctacaatttctggagcaatagcaagaaacataattccagcttcagaagcagataaaaatattcagtttgttgataaatatacaggaacaaatatctctgctttaataccaacgcggtacgcctatggattagaggatggcaaatactacactttttcattagacgttgcttctcctgaaagacgtgaaaaagagcaccgaccatatatgttttccgcgcaacttgcaggaggtgctattgctctccccgatccattcaaagaacaagttgagaagagttttaaggaaaacaagacacctaagtcgaatcgagaatctgccagctacctaaaagagattggtgctgacatgtacaccgatcgagatagaatgttttatgagcttttacaaaatgcggatgactcatcgtcgcctaaaggtgtaaaggtaatggttcaagtaaaagacaattaccttatttttacacatgatgggctatcgttttctagacaggatttcagatcgatcgtttcaacggcaaatagtacgaagaggcttgatagaaagaaaactggatataaagggattggctttaaaagtgttttcacagattccgaacgggtttttattaaaacagctggatttttcttcgtttttgacaaaaatgcccatatattcaataacttcagagatttctacagatatgttaatccaatatatacggaagaacaattacaattgttttttgaagagaatcgagagaacgaagaagattttgagggtgtagatcatttaccatggcaattattgccgttctgggtaaatgagtgtccagaagaattacgtggaacaagttttatgcgtaattgtaatgtcgctattgctttggaaatggatgcgacagcagaacaataccgtgaaattatcaagggtattatcaagaaaccccgattcatgcttttcctaagaaacactctaagaatacaattcggtgagaaaaaatgggaactgcttagcattgccaaacaagaagacaaacgaacaggtattgtaaaactcaagaactcttttgatgaaacagaagaggaggtttcgtatatagtaaaagaaggttgtgatattgctgttgataataaaaactttgaggtatgtggtattccgatgaaaaaggaatgcaagaaactaggaagtcgcgaaaagtggtttatgtatcaaattgtagacaatacagaaattcctattacctcaataccagagagaattattgctgcagacacaacgactttgtcatatgcattcatgttagacgaaaatggtcatgcaatccctatacctgataaaacgccatctctgtatgcctatcttccaatggaagacagaagatatttattcccgttctatattaatgccgattttgagttgtcctctaacagacaaaacgcaaaacaagttagtgtatggaatgagttcctcttttacaatattggaaagagtattgtatcttgggtatctacattagcatctaaagctcatccatcatatctttccctacttcctaaagaacttcttactgaagaattggaagaaagtaaagttgataaattggcaaaacaatttaatcgaggctataccgaatcgctagtaacaactccatttattttaaatgataaaaatgaagtagtctgtcaatctgatattatcatagatgagtcaggatttgcagacataattggtgcatctgatttttgtgacctataccgattgaacaaacgattgataaacagcgaaatcaatatagaacctcttaaaatttcaaatattttctctagtatagagcatttgcagacaagcaatgttgtcgaacgtattcttgacaagaaaaaccgcatttctatattacgttattggctttcaatttccaaggaattgagattcttagtgttaaatcatattgcaaatatgcctggcaacagaaagaatcttgacgatcagattgccgatataccagcatttacttctatggggagattgtatagttttaacaaactacttacttctcgaaatataatacttcgtactgaaacgattaaaggaatagaagaaatcctattaaaattgggctttgaaataacagatgaagatatttcgacccacgcttttcagcataaactacaagaacagctaaaagcatatagtatatatttgttctccatcattgcaaaaaagacaaaaacagatgcccacaaattatctgaacaagagaagtcttcactctttactcattttgcatcaaacaagataagcatcaaaaatgaagatctaaatgcatgggaaattttctcaaatcaaaatggaaggataatgcctatatcagagcttactcacatggatagttcactctacaatgatattacaagagaatatgtcattgatgaatctgaatatcttgctgttggtaaaagcttagataggtatttgatgaaggaaaaagaccaatttgataaggtagtagtaaacaagtgggatgaccttgttaaggagattggcagcaacaaagagaaggcaatgtctttatactcattggcttctactacttatattgtcgcagaacacgaacaagctaatgataataaaaaagaatacttctatgacaagaattgtgtatttgtatcagaatcaatgcacaaaatagatgatgtgatttttagttcatcaattgcaggcgaagaagatataataccgattatagagttgctttctggcaaattggtcgttacagatatagttcttaaggctttacaaaaagatccatttaattgtattgaacaacaattagagcaaatttatctatcctcagacaaagtcataacaaaagaacaggtaaactgtgtcttagactattgccatagaaataacgaaacgatattcaaccattattttataaagcaagtagaagatggctatgttttttctatgattgacaaagggtgttgtattgcatatacgaacaatgatgctttaagaactttcattgagaataattgcaataatttaattttactccaagaagatttttgtaaatatactgatattcaagacatattgacggaagaggaattgcttcttaaagtcttggaaactgtacaagacgttaagccttatgcagatactctgcttccaatatataggaatagcataagttctgtaaaaagagcatacattgaacatatttcgtccatacaactaaacgatttcagctttactgaagattccgacatagatcttcagcatttgcttatggctagttcaattgaaaaacaggatgaaatcttgtttgataaacttcgaactttgatggttgttgtatacgatgaaaagcaatatgctttctcttctattaaattacaacatacaattgagtcaaatggacaaaaattccctctatcaaaacttctgcctaatgaagacaagattgcgatgcttgtagatagcttgaaagaacgtcttgaggagaagcatgtttctcaaacatttttagacagtcttttcggaaatgaaattgatgaagatagagctgatgaagtatttgatcaattgaataagactgattttatacttgagaatggagtacaattggcatttgttatcaaatatgtgcaagatagcaaacagaagaaaaacattctttgtagtgtgcatgatgctgcatcaacacctcagagtcactctatttcatacaattggtatataaacggtgagattttcaatgatagcactcatatcctagcaacaaaataccaagatattgctaaatatttaacattaccgtataccgaagcagatgctaagtggttcatcaagaaaaatgttgatgacttccaatatataaagagtaaactatctattgaagaagaagaggcgcttttggattatatcttagagatgcatcaaaaaggtgccaagctgactagtgaagacttaaagtgcattaagggggttatcggtatgaaagatcaggagtatgttttatcttctaagtatgccttgccttctgaacttctgccagagacaataacagaatggatatcttcatcggatgctgaaaataagagcaaattacttaaaaatatatttggagtccacacgaatgattctgatatagtaaaagttcgagagtttttggataatggcaatcatttctctataaacgctcaaaataggactttatctaaaatgttaagtaaatggattgccgagaactcaatttctctagataataccaaattcttaacaattgttgatgtgttagatgaaaatgattatatcatagaagtcaattctgaagaattgtcaaaatttgaatcaccagaatatcgttatactgcttttggtgattattatatttatctttgcaacggagaaatcccttggactgttaaacttgtagacactggatttattttccatacctataaagaaaaggatgtcatcctaaatggatataacatattcgtaaattgtaatgaagagcagtctattcttgatcttgtacgttctttaatcaatacggatcgatttacagctgaagattttatgctgtttttcgatcaagagcaaaagagaatctctggtacattagatggtgaaattgatgatgatatagacgaagatgcacgagctgctgcgagtcaactcgccaaacaggaagcaatagaatggctttctgcaaaaggttacgatacaagaaacgttcgcaccagttattcttttgttgaaggagtatgtaagggaactaccgaatataatatagtagttaagagtttcaggtcatcatctaaggaattaaagattaatccgaatgaatggctacatctgttaaaaccaaactcacgtttaatgctatatatggggcacatgtcttttgctgtagttgatagaaaagctcttctaggaaatcatgacttccttagattgagaatatcatcttcaaactttagtgttgatggaagcaaattagaggaaagtcttgaacgattagctaatgacattcagtattttgaaagaacacactttgtgtttgaacgagttcacgatagtattctatcccgcgctaattcattagatgattatggtttgttccaaagtaattcaaatcaagaatattctgcaggtaatgatgaagatatagaatgaatatagatagactaaaacaaaaacaattcattcaggatgaactcaaagctcaaactgatgctttcaagcagaaattagaaacatctgcgttggatttgctcttagagaagaacgaagtattcgttggtatgttcataaagtttatggacaatggtgaagctttgttcaaatttcctgtatctagagcattgccaagaaaaaactcacattattattgctttacattgcctgatgttttgaaaagatataaggattggggaaatctgacctatggggacctgattaagaaagagacatcagcaaccagtattaaatgtgtatggcactcatcatccgataatcccaaatttatgcttacaggatgtaaaggtgttacagaggacttcaaaaaatacatagaaaaagtcccaggcggtattatcgttcttggtccagaagtacccccatatgaatatcttgcaaatttggaaaaagtttgccattcatatcatcctaaatgtacagaaattctagatgcagactatgagcctaaaccatggaccccttcgttgttatcacacgatatgaatctgtctgacattgtattagaagattttaaaaacaaagatgtagtaattgttcaaggtcctccaggaacgggtaaaactcatcgcatatctcaattgtgcgatatgctttgtgcaaaaggtttttccgttttggtaacagctctaactaatagagcgttaatggaagttgctgataaattgagagagagtcttattaaggaacataaagtatacaaaaccaatttaacaacagatgaagctaaagaagtaaatggtattcaaaatgcagagaaagtttatgcaatacctggtaagttaatgctttccactttttatatagcaagtggctctgcggtaaatggatatgaaggaccattatttgattatgtaattgtagatgaagcaagtcaggctttttttgcaatgcttgcagctacaaacatgcttggatataaaaaactatgggtaggtgatgtatatcagatgcctcctattgtattaatgtcccatgatagaatcaaaagacaaggctatgaaccattagtaaatggactcgatactataacttcttctaacaagtattcaaattatcaattatcagatacctttagacttggaacgaatgcagcaaaacttacaggattgttttacaaaggagcactaaggtctttggcaaaagaatctaatatggtttctcaaaagaaagaaggccccgttattattcctattgatatgccaataggagatcctattccttctaatgcaattaaagaagcagtaagaattgcatccgacttaatacagcaaaataaaaaaatagaaattgctattttaagtcttttaataaaaacgacaacagctctgcaagtagaagttactcgtactattggaaacacaaataatatactagttgagactgtcgcacgtgttcagggcattactaaagatgtaacaatatatgttattccaaatacagattcaatggtgcacagtttagaacttagattatttaatgttgcaacaagtcgtgccaaagataatacctatataatttgtcctaaagatattttaagttatacttatatggcaccattagttcgagaatatttagtaaaattgattgaaaacagttgatatggcactagcaataaacataaacgacctgctcaacaagcagaagatagaatccaaccgaattgagtttaagaagggttggaatccggcgagcatataccacagcgtatgtgcgttcgccaacgattttgacgatcttggtggtggctacatcgtggtcggtgtggatactgacgaaaagacgggtgtagctattcgtccggttgaaggtatacctacagaaaagattgatggaattcttcaagatatggtgggttacaacaacaagatttcgccttattatatgcctcgcactagtgtagaggaagtggatggtaagtctgtgcttgtgatatggtgtccggcaggaatcaaccgcccatattctgtaccagagaacgtaacagccaagagtaacacaaaggaatatttctatgttcgtagtggtacgagtagtatcatagctaagggggaagttcttgatgaactgcgtgaattggcaagccgcgtgccatttgatgaacgtggaaatcccgatattaagatagaggatatttcaacgcttctgttacgagaatatttggtgaaggtgggtagcaaacttgccaatgaactatatacaaaacctcttgatagtatcttggagcaaatggatttgtatgtcggtccaaaggaaaatcgtatgctcagaaatgtagcagctatgatgttctgtgaagacccaagcaaattctttaagcgcacacaagttgaagtggtatatttccctgaagggcgattgaacaatccaaacaacttatacgaaggtcctgtaattaaaggttccatcacccagataattgatagaacattggaatacctgaatcgtatgcttgtaatgcagacggtgataaaaccaaaggatagcagtaggagtcaaaagtttgttacctatccatatcaagcattggaagagagtgtaacaaactcactctatcatagagattatcgagaatgggaaccagtggttatcactgtagaacctcaaggaatcaccatacagaatgtcggtggacctgatagaagtatatctgcagccgatatttcaagatgtgaaatcttagtctctaagcgttatcgtaatcgcagacttggcgaatatctgaaagaactggatttgacagaaggtcgcagtactggtattccaacaatccaaaatgttttggaaaacaatggttcacccagagctacagtagttacagacgatgaacgtactttctttagaataactattccttgtcacgaagcagcaggaaatattattgccgacattgcacataaagatggttcactgaaagcatctaaacgaggttcactaaaaactgcactacaaagtgcaccagaaactgcactacaaagtgcaccagaaactgcactacaaatcatcaatgaaattagaaataatcctaatgtaactctttcagagattgcagaaaagattggtgtatctcgacgttggattgcgactaatatgaagcatcttcaagatacaggagttgttaaaagagttggacccaacaaaggtggtcattgggaaattataggatagtttaaccgttaatatagaacataagatgttattaggacaaaagataaaagaacttaggttagagaatggtgttttacaaagacaattagcatcccttcttgagattgacacccctatgttttcaaaaattgaaagaggtgatagacgtgcaaaacgcacacaagtaattcaaattgccaaatatttcaatgttgacgaaaaagaacttctcaccctttgggtagcggataaagtccttgatgcagtagaggatgagaaagaattgaagtcagaagcaattaaagtggctcagtctagcatcacattgtaattacaaaatacgggaactttatggtatcaattcatgtagttcccgttgttgtatcactgataatcagcaaagtattaatctcatttcggttcaagggtggagccgtcattcccaaaccctacctatttgtcgaacattatccaattatgaaggacatatgctatcaaatgcgggaacgcggcatgaccttcgaagaagccgaaagccgtataaaagagatggaagatgatttacatatttccattgcacgcacacaaatctactggaacaatgtcatcagccgcatggccaacaacagaacaaacaaaaaactggtgcttcagaatactctgaaattcatcgatgaacaccatgtgccgatgagtccggaaatatattactcccttttacacacaatcacttccattgaagactatacaaaagtcaaaggtttatataaaggcgaattgaatataggacatatcttcgtacttctaaagaagattccagaatttgccaaatatagaattgccgaatgggcatttgtcgcctgcttgcgtcaggagtttgatgaatggtatgacattctatgttccatcagtgagaaagagcaggagaaaagaattaaaatcatgttacagtccgagcactacagtaagcattcggtaaaccacgtattttcgtctccaacttccatcattaactttacgtccaaaaagccaagttatgatgacacgagaagaagtggtagagataatgaactactgcaaagagcacaaaatgacttataagtcaagactggaggaactcaatatccctgtatggcggttttatgacagcaaatcccgttatgccgccgagcaatcatctggtaaaacggctcaaggtgagtttatcgagcttccgcacagcggatcttttgttccggttccttcatttgccggaacgagcggacgtaaacagaaaagtataccggccacgccaagcggattgaaagagatagaaatacgtaccccggccggtagtgccatacgtatctgcggtgaactgaacgacaaggaactgtattcaatcatccaggcctgcagccatgttcagccttaatgacagtatgcgctatctgttgtataaccgccctactgatatgcgcaaaagctttcatactctcagcggtatcatcaccgacgccatgggtcaggacccctgcagcggcaatgtgtatattttcataaaccgtgcccgtgaccgcataaagctcctgcattgggagccgggcggcatggtgctgtattccaaacttctggaagccggtaccttaggcaagcctgattctgtcaacgacaatgaggtctgtgcaaatatagaatggcgggaacttgtcatgatagtggagggtatcatggaagcccgcgactcccgtcgcacgagacttgaaaacctgcagaaacttcgaaaatagtgccgttttcttactctgtttgcttttgtatgtcattggattttagtatatttacattgtgaaacaatgagatacagatgcttacggaagaacaggaaaaagccttattggaagagattgataagctccgccaggataaagcggcgcttatcagcagggttgcttcgctggagcagtcgctgtactggctccggaaaaaagtcttcggacggatgagcgaaaaaaatcttccgcttgatcccaaccagttgtttctgttctcaaaagaagaaatgtcctccatggaaatatcccggatggaggatgaagtccgcaagagtgaagaagaaatcaccagaaccataaaagtcaaggagaagccgtcccgcaagcccttggatacatcttctcttccggtagaagttgttgatctttaccccgaaggaacaactgacggggaaggcaggcttaaggatgatttcattgaaatcggaaaggaagagagttcacgcctggagcgtgttccggcaaaagtatatatcctgaagaccgtccgtcacaaagtgataagaaaatccgatatggagaaatatcccgaggaaaggcagattctgattcacccgctacctcttgttccggtcagcaaatgtatggcaggcgcctcggtcctgacggacattatcatcggcaagttcatgtatcatctcccgttctaccgtctgatacagcagtatcgcgaatcaggaatcatcataagcgaatctaccatgtgcggatggtatgaaatggcggtggagaaactcaggcttctgtacaacctgctcaaacagaagatactctccagtgagtatatacaagtggacgagagtgtcattcctgtgatggacaatgagaaacataaggcgaaaaaggggtatgagtggtgcgtacgcgacggcatcacgggggatgtcatgttccattatgaccgtggcagccgttcgggcatggtagcccgtgaactgctgggatgctgccgtggcattgtgcaatgtgacggctatgcagcttacgaacagtttgagcagatgaaaggaattactctggccggctgctgggcacatgtcagaagaaaatacgtggatgctctggaagagaacaggaccctggctacacaggcgattcactacatcggcaagttgtacaagatagagtctgatgccaatgatgcagggctcactactgaagagcgtaaggaaaaacgtatccatgagtcctatccgctgatacttgaatttgaaaagtggctgcaggatgcttatcttagagtacttcctaaaagccgtatgggtaaagccatcgaatatacttacacgctccttccaagactttccagatacgtaaacgacggaagaatcgaaattgatgacaaccgcatagaaaatgccataagacctttggctttgggaagaaagaactatctgttctgcggcaacgacgcatccgcatacagggctgccatcgtgtactcactgattgccacctgcaaatcagcagaagtagaccctagaatctggatggaagatgtcctgagcaaaattccatattatgagagggatgagaagaatatggaagaacttctaccacgtaattgggcaaaatccaatcaaacttgttccgaatagatactattagttccgaatcgactacgaatagcaccgattcggaactaattcacaaaatttgcaacgtggtttaccgaatgcttacggactatccgctacgccgtctcagagactgaagagcaacggaagacagaattggatacccttgtcacaatgatacccaacccctttgtacctcagtatccgaaaatgatagagaagttctttataccttatccgcaagacttgcttgaaatcattcgagaatatataggccggattatttcatccgagccgcaatagccagcaataccccgagcaccacacccaatatcgctgcaaacagcacccgcatttctcccggcaggaggaatgtgatggtgtgtgccggataccagaagaaaggaattgttttcttgaaccttaattccgcaacactattacaaatataactttttaagtacctgagcaacaaaaagttgctcaggaatttgccatgtcagatttttcacctatcttagtgttgcaaatcaaaatatgtatcaaacccgacagacatggcaaaggtagcaattaaatccgagaaactcactccttttggaggaatattttcaataatggagcaatttgactccagactctcatctgtaatcgactcaaccctcggtatgagatgcaggctgtatggttatcaatacagcgaaatcatccgttcgcttatgagcgtttatttttgtggcggctcatgcatcgaggatgtcaccactcatctgatgtaccacctttcgcttcatccgacacttcgcacatgcagtgccgacacgattcttagagccataaaggaactgacccaggataacatttcctacacatccgacactggcaagacctacgacttcaacacggcagacaagctgaatacactgctcctcaattgcctattgtccacagggcagctgaaagagggcgaggggtatgacgttgacttcgaccaccagttcatagaggctgagaagtttgatgcgaagcctacatacaagaagttccttggttatcgccctggcgtggcggttattggcaacttgattgtcggcattgagaacagcgacggcaacacaaatgtccgtttccaccagaaggacacgctgaagaggttctttgaaaggtttgaacaaaacaagcttattatcaaccgtttcagagctgattgcggctcgtgttctgaagagatagtggaagagattgctaaacactgcaagaccttctatatccgtgctaaccgatgcagttcgctctacaatgacatctttgccctcagaggttggaagaaagtggaattgggcggcattgagtttgagctggcctccattctcatcgagaaatggaaagggaaggcataccgtcttgtgattcaaagacagaagcggatagacggcgaactcgacctgtgggaaggagaatacacctaccgctgcatccttacaaatgactacgagtcttccgagaaagagattgtcgaattctataacctccgtggagggaaggaacgcatcttcgatgatatgaataacggattcggctggaacaggcttccaaaatcctttatgggagaaaacacggtgtttcttctgcttatggcactcatacgcaacttctataaattcatcatggcgaggcttgacgtgaagaggttcggactcaaagcaacaagccgcatcaagacgtttgtctttaagttcatctctgtgccagccaaatgggtcaggacatcaaggaagtatgtgctgaatatctattcatgcaacaatgcttatgccaatgtgttccagaatgactttggataacaccgacaacttatagtcgtgattttgcgtattgcctcaagtcgcatggtggggtaaggggcatttatatgtctttatggtgacattcgatgcactgtgccccctttttactaacgatgcagattcttttcgcttctgtatcatattaggcgcgtagttgcggatttgaggttgaagacaaaattccattgtgcatcccaattcagatgcgtaatgatgcgggtcatcgggataggagtgaggaggctgcgaggcgaaccgccacaatccaggatatgcgtatccgtaatcttatggaatgtcatgaataccggagcgaaaatggtattcatagcaactgaaatggcgaaggctatccataatttgtccaggcagaattctccgtttataatggcggcggcatttgccattcccatatattccatgaattgaggcacacctttggagaagattatcatggccgcattgatacccattcccagcagtccccacactacggcacgcggcagtacgccaaatccttttcggttatagactccggcactgatacgaagtcccagcatctcacccagtgtagcaagaattccgaatttaacgaaactcattaccatgccatgtgcagcgttgaaagacttataccaattgtagatggattcactcacaaagaatggcaggaatattatcaccagaacaaaaataaagaggaagtcttgctttttcatacaaaagtcatatttttcataaataatgtggcaaacatactaaaattattctgatttaaaagcaaataagcaaataaaaggtgttttgccaaacagaacaaagtgtttcccttaaccgaacagtctatttcattaaagggaacactttgtttcccttaaaagaacatttcgtttcatcatataaaaacactttgttttctatagctaaaacaaagtgttcagcactgtgaactaacgaattatccctatcagcttccccagaagcctatatcatagtctcggcacaaaaaaagtgggattcagagaaacctctgatcccacttcatcatagtaagcaacggatagttatttcttatctttcatatattcatccgctttctccttggcacgtgccacgcgcttggctgtatccggatgagaagagaacatcttctggaacttagattccttcggtgcttccgctgaaagttcaagcaatttgttcaaagcattgtacatggcatacggagcgagattattcttgatgcagaattcaaagccataatcatccgcttctgtctcctgcttctgggagtattgagcacctgccaatgcctcggccatggcacccagttcagaatcactcaatttggatactgtagaacttgccgcaccggcagcattcttcacagccgaacggaggtaagcattcttcatcgcatctttggaatccgtatggatgacgtgacctatctcatgaccgacaactgccatcacttcatcatccgtcatgatgtccatcagtccggcgcagatgcgtacactgccatcaccacacgcaaaggcattcacatctattacctcgtaaacaccgaagttcaccttcaagccgtccacttccttgatatttccagtcagcttctccagacgcttgccgtaatccgtatcgggctttgtcagcggattgtgtgtatccatccattccatatattccttgctcatcgctgcaatgtcagcatcggacaatgaaatggccttgacggcatctgtaccggcttggacaactttggtcacattgattttctttccaccgattttgaactgcgcataggcagtggtggtacaactcattccgcatactacagcagtaatgatgaagaagttctttttcatgtactttacgatttaattttaatcctacttcgctttgtctataaaaaaaaacgcctaatcattattaaacggttttccgaatatctgtttaaatcaagtttacttgatgatacccaattccttgaaacatttagtcaatttttctacagcataatccacttgttcgaccgtatgggtagccatcaacgctacacgcaccagtgtatcttgtggagcacatgcaggtggaataacggggttgatgaagataccttcgtcaaaagccagcttcgttactataaatgtcttctctgtatcacgcacatagagaggaatgataggagattctgtctcaccgatttcgaagcctgcatcgcggaacttcttcaaggcatagttagtgatgtcccacagacgttggatgcgttcaggttcggacttgatgatgtgaagcgcctcgcgggctgcagccgtagcagcaggtgtgctacttgcctggaatatataggaacgggcattgtggcgcagccaattgattaccgccttgtctccagcaacaaaaccaccgatggaagccaatgacttgctgaatgtacccataatcaggtctacatcttcggtaacaccgaaatggtcgcacacaccacggccttgttttccgaatacacccaagccgtgagcttcgtccacgtaaatgctggcattgtatttcttcttcaggcggacaatttcgggcagattggccaagtcaccttccatggaaaatactccatccacaacaatcagctttacagcatccggttcgcatttctggagttctttttccaaagcctccatatcgttatgcttgtacttcaactgagtggcaaatgcaagacggcggccatctacaatggaagcgtggtcacggtcatcacaaataatataatccccacggcctacaacggcaggaataataccttcgtttacagtaaatccggtagaaaaacagagtgcttcatcttttcctacgaattcagccaattccttctccagttcaacatgtatatcgagtgttccgttcagaaagcgggaacctgcacaaccggtgccatatttttctgtggcagctatcgaggcatcaatgatacgcttgtcatatgtcagtcccatatatgcattagagccgaacatcagaacctttttaccatccatcattacctctgtatcctgatggctgttaattgtgcggaaataaggatatacgccttttgccataaactgctgcggcaggtcgtatttcgcaaatttgtcttgtagtaaacccatgaaatatcttttatataatgaatatttaattctattaaatacaagtcttaaaaaacagggggcaaagatagcaaaatatgtcggtatatgttctatttacattaaaaaaactacttatacttattttaaaaagaattatgtggttaatttttcagatatttatattacttttgccagttggaaaacctgcatagcaacaacccttgcatgaacgaaaacaagaagaaaatagcattcatcataaaccccatatccggcactcagagtaaggagcagatactgaagtggctcgatgaaaaactggataaggaaaggtatgcacaagaagtgatttataccgaacgggcaggccatgccgtagagatagcggcacagaaggcacaagaagatgcacatgccgtcatcgccataggaggagacggcaccatcaatgagatagcccgctcactggtacatacaaaaaccgctttgggcatcattccctgcggttccggcaacggacttgcccgccatctgcagattccgatggagccgaaaaaggccatcgacatcatcaatgacggactgatagacatcattgactacggaaaaatcaacgatgtgcctttcttctgcacctgcggcgtgggattcgacgcatttgtaagcctgcaattctccaaggcgggaaggagaggaccactcacttatctggaaaagactctgctcgaaagcctgaagtaccgtccggaaacctatgaactggaaatggacggcagcaccctgcgatacaaggcgttcctgatagcctgcggaaacgcatcgcaatatggaaacaatgcgtatattgccccacaagccaccttgaacgacggactgctggacgtcaccatactcgagccgttcactgtgctcgatgtaccgtcgctctctttccagctcttcaacaagaccattgaccagaacagccggattaagacgttccgttgccagacactccgtattcaccgttctaaaccgggggtagtccactttgacggcgacccgatgatgatgggagagaatgtagatgtaaagattatgaagaaaggactgcaggtcattgttccccgggatgcggaaaaagacacttcgaatgtcttgcagcgggcacaagactatatcaacggactgaaacaaattaatgatgcttttgtggaagacatcgcccataaaaacaagatgatactggataaaggcaaaaggcaattcaagaaactgacaaaaatgtaatgttgtaaaaaaggtactaaaggagtttctgaaaataactttccccttttgatgcgccatataatatgttttatgtatttttgcatgttcaaaatagtaaataagtaaatcgtcaaacagtaaataaaaagatgtatagatcacacacctgcggagaactccgtatctccgatgttaacaagcaagtgacgctggcaggttgggtacagcgcagccgtaagatgggaggcatgactttcattgacctccgcgaccgttacggaattacccaattagtgttcaacgaagaggtgaatgccgaactttgcgagcgtgccaaccgcttgggccgtgaattcgtaatccaggttaagggtaccgtcaacgaacgtttcagcaaaaaccagcatatcccgacgggagacattgaaatcatcgtatcggaactggatgttctgaactcatcgctgacccctcccttcaccatcgaggaaaatacggacggtggcgacgatatccgcatgaagtaccgttatctagacctgcgccgtgccaatgtacgcagcaatctggagcttcgccataaaatgacaattgaagtacgcaaatacctggacagccagggattcatcgaagtggaaactccgattctggtaggctccacacccgaaggtgcacgcgatttcgtcgttccttcacgcatgaacccgggacaattctatgccttgcctcaaagcccgcagacactgaaacagttgttgatggtttccggtttcgaccgttacttccagatagccaaatgcttccgtgacgaagacctgcgtgctgaccgccagccggaattcacacagattgactgcgaaatgtcttttgtggagcaggatgacgtcatcaacctcttcgaaggcatggccaaatatctgttcaaggaaatccgtggcgtagagatgaacgagccgttcatgcgcatgccatgggcagacgccatgaaatattacggcagcgacaagcccgacctccgtttcggcatgaagttcgtggaactgatggacatcatgaagggacacggattcccggtattcgacaatgccgcctacatcggcggtatctgcgcagaaggcgccgcacactatacacgcaaacagctggatgcactgaccgaattcgtgaaaagaccgcaaatcggtgccaaaggtatggtatacgcgcgcgtagaggcagacggcaacgtaaaatcaagtgtcgacaagttctatgcgcaggaagtattgcaggaaatgaaggctgctttcaacgccaagccgggtgacctgattctgattctgagcggtgacgacgccatgaagacccgcaagcaactgaacgagttgcgccttgaaatgggtaaccaactgggattgcgcgacaagaacaagttcgtctgcctttgggtagttgacttcccgatgtttgagtggagcgatgaagaaggccgcctgatggctatgcaccacccgttcacccatccgaaagacgaagatattcctttgctggatacagacccggcagctgtccgtgcagatgcatacgacatggtgtgcaacggtattgaagtgggtggaggttccatccgtatccacgatgcacagttgcaggcaaaaatgttcgagattctcggattcacttcggagaaggctcaggagcagttcggcttcctgatgaatgccttcaaatacggtgcacctcctcacggtggtctggcatacggtctggaccgttgggtcagcatcttcgcaggtctcgacagtatccgcgactgcattgcattccccaagaacaacagtggacgcgatgtaatgctggatgcaccttcggctattgaccagaagcagctggatgaactgaatctgattgttgaagtgaaagagtaaaagcaggtacggagtaggagagtgaaagagtctgcacgcatttttcgttttgcggtaatcggcacgctgaatgccttgattatggctgttaccgtttgggtaatgatggacgaactggacatcaactatatgctctccaatgtaaccgcatatatacttgcacagatacacaacttcatctggtgcaagtactggatattccctacagaaaaaaagagcaacacttggcgacaagtgctgctcttttctatagctttcggaatggcttacggagcgcaattccttttcctcatagggctggtggagggactggactgcaacgaataccttgcccagttcctgggattattcatctacggaagtgtcaatttcctaatgaacaaacgggtgacattccgttagttctcccccagagatccccgtcgttatcagtcaagaaatcgttttgtcaatccggcataggcatcaattctgcggtcgcgcaggaaaggccaccaacggcgtacattttccgaacgttccaagtccacctctacaacgatattttccggccgttcgtttcctgcttgggccaggaactcgccttgcggtccggccacaaaactatttccccaaaacaagataccattggtctgcatggaaggatccggctcatgtcccacgcgattcactgaaaccaccggcaagccgttggccacagcatgtccacgctgggagataatccaagcattgagctgacgcgccttttcatcatccgtatcactgctttcccaaccgatagccgtaggatatatcagtatttcagctcccttcagtgccatcagacgcgctgcttccggataccactggtcccagcataccaaaactcccaatttgcccaaagatgtctgaataggttcgaagcctatatcaccgggagtaaaatagaatttctcataataggcggggtcatcaggaatatgcatcttccggtatttcccggcaatgctgccgtcacgttcaaaaacaaccgctgtgttatgatacaatccgggagcgcgtttctcgaacagagaagtgaccagcacaatatcgttggcagcagccaactctgaatagaatcccgtagaaggaccgggaatcggttctgccaagtcgaacaactgcgtgttttccgtctgacagaaatacagagagttatgcagctcctgcaaaacaactaattgagccccatgcgccgcacatgcctctatacttttggccaaattcattaaattagtcctgaggtccttggtattggcctgctggataatacctacttttatttttcttgtcatcttattctatggtttattgttttactatgtataatcgacattacttcaacacccctacgggatattgcatggtaacacaatgcaaagagccgtgttgcttaatcaaagcacggcaatctatcccgataatttcataaccgggaaaagcctcccgcaacacttcccccgcgcgggcatcattctccggctggcgataggtggggtaaagcactgcatcattcagaatcaagaaattagcgtaagtggcaggaagccgttccccttcctcttctatcttatcggccatgggcaaagccagcaaacggtaaggttcccccttcaacgtacggaaagtcttcagttgctcctccatgcgatgcagttcttcgtaatgctcatcatccgcatccttgcattgtacataggctatcgtgtcggcagggcagaaacgggccagcgtgtctatatgactgtccgtatcgtcacctgccaaataaccgtggtccagccaaagaacacgttgcaggtgaaaaacggaacgaagatattcctcaatttccacccggttcatctgtccgttccggttaggcgaaagcaggcattcggaggtggtgagcaacgtacccatgccgtcactttcgatggaaccgccttcaaggacaaaccccaagcgatttacatactttcctttcatcacttccgactccaccgcacgacgcgtaatcaaattatccttatcggatgcaaacttcaatccccacccgttgaacttaaagtcgagcagagatacaccgtcagcatccagtagggtgatggctccatggtcgcgtgcccaagtatcattcgtctcacacttcaggaaacggacattttccatattcaccctgccgagaatctgtttcttcacctcatccggttctggggttacaatcagcaatgtctcccgggcggctatttcgtgggcaatggctacaaaacattcctgcacttcgtccaacatataggtccagtctgtacccgcatggggccatgtaagctgtatgccgctttgcaaagcccattcggcaggcaagtggggagcacgtgtctctacctgaaaagtcatattcttgccaaaacgcacctgacagtccttctctgcggcaccacccagcggcagtcctacaaaatatcccatattatttatcttttctaattcgttactttttaagttagcagagagagggagaataaaccttaggtttagaattgccaaacctctacttcagacttctaaacctctactctatgattgtaaacctctactcgtcaattatcacttatcttccttcggtttccggtcgaagaacggattcttggaggatgcactcaccggaatggcaaagactgtcttgcattctttcagccaatccaaacgctgggcggcaagtccggcagaaaacatcacacgggtatccaccctcaaatcggcagccatggcacaagccgaacctacagctatccctacatccaccgtattcaaggcacaaggtactccctccggacgaccggcacaagtgggaaaaccgcagtgtccgcaattcaaaccttgcgtctgctcgcgcgtacctattataattacacattcagcctgcaaaatgttgtccgcatcacggagaaagaacttcataccgtgctcttcaaccatagcgaccatcttttcagacagcttcttaatgtcttcacccgtaaccagcgcagcttcaatcacatcaataccttttcctttcggtgccgtgcgcgcagcagtcagcatttgccttgccacgtcaagcacatgttcgtggcggcaatcccgttcattctgtatcatagtctttctttcctgaattaattagtgcgtcaaagatagcacaaatatttttttgcactatctttgcgatacagaaagattaaaggaacaccatgctgcaaatagaaaatgccagtatcgcctacggcaacgatatacttttctcgggtttcaacctgcaattggaaaggggagagatagccagtatctccggcccttcgggatgcggaaagtcgtcactgctgaatgccatacttggatttactccgttaaaagaaggacgcatcgtcttgaacggcattctgctggataaaggaaacgtcgacgttgtccgtaagcagactgcatggattccacaagaactggcattgccgctggaatgggtaaaggacatggtacaattgcccttcggtttaaaggcaaaccggggtacacccttttctgaaacccgtttatttgcatgtttcgaggatttgggtctggaacaagagttatattacaaacgggtgaacgaaatatccggaggccaacgccaacggatgatgatagccgtagcctcaatgattggcaaaccactgaccattgtcgatgaaccgacttccgctctcgactccggttccgcggaaaaagtactctctttcttccgcaggcagacagaaaatggaagtgccatactgaccgtatcccatgacaaaagattcgccaacggatgtgaccgacatataatcatgaaataacatacacactattgggaaccatagatatatcatacctcagcctgggcatcggattattgctattattaataccgctgttttacatctggaagttcaagaccggactgttgcgcgctactgtgataggtacggcacgcatgattgtccagttgttcttcatcggcatatacttgaactacctctttttatgggataacccgtggataaactttctatgggtaattgtcatgatatttgtagcatcgcagacggcattggcacgaacacaattgaagaggaagattctgctcctgcccatatccgcaggtttcttatgcagtgtagtatgtgtaggcttgtactttatcggaatagtactgagagtggaaaacgtattcagcgcccggtatttcatccctattttcggcatactgatgggcaacatgctatccagtaacgtcatagccctcaacacctattatagtggactgaaacgggaacaacagctttaccggtatcttctcggcaatggtgctacaaaagcggaagcacaggcacctttcatccgccaagccatcatcaaatccttcagcccgctgattgccaatatatccgtgatggggctggttgcttttccgggaaccatgattggccagatattgggtggcagcagcccgaatgtggccatcaaatatcagatgatgattatggtcatcacctttaccgcctccatgctgtcactgatgattacaatctctctggcttcccgcaagtcgttcgatgcctacggcaagctactgccggtgatggtagagaagaagggaaaaaaggagcataaataacttcaacggtgatgggcatccagttttccggggagatagcgtagctgcacatattgtacgcccggtttcacaaagccgctgtccaacatcactttctttacacggaatacttcaagcctatactgcaggtaacttttgatgcgttgactttgcggcttggtatatgccagcagattaacttttcccagcgaatcaatctctacccttgccttgacggtgcgtagagaaagaggaccgtcttttttcttagcctgataatctttatccttgtctacccaaaagatagccgtagccttgggagtagtatctaccggctcctccatatcctcagatacatctttaccggaacggttcgtatcctgacaagacaataacgataaaaggaaaagaaacaaaacaagtaatgttttcataataaagatactatgtttgtagacgttcaaaataatcgctcgtcgggacgggtggtcccgccccttgccgctgggcgctccccgaccgatgattaaataagaataggcgtaataatagaattattaactttgtaaatgagagtttatcaatgaattaataatccaaactattacacctatggtacaaagtaaaggaataaattttaatggtcaaaatatctatataggtattgatgtgcatctgaagagttggagtgtaactataataacagaatcgggttataaaagaactcactcacaaaaaccttcagccaaagagctctttgaacatttgaagaaacattatcccaatggcaaatatcaagctgtatatgaaagcggctttagtgggtattccacttactatgctttgaaggagtacggaataaagtgcatgataattcatgctgcggatgttcctacgtctcaatatgagaatgtgatgaagacagatgccatagattcagaaaaattggctaaatctttaaaaggagggttattgagaggaatatacgtcagggacaaagaagaattggatgaccgtagtcttatcagattacctaaaactttacagaagcaacttggaggatataaatcacgtgtgaagcatttactttacaataatgggatttcctatcctgattgttttgagaacagccgttctcattggtccaatcgttttatatattggttggaaaatgaagtgagattattgtcgtccaccagactttctttggatttgttgatagaccaggttaagctgttcagaaaaaatctactgaaagctacccggatggttcgtgatttatcaaagaaaccgcaatattctcgacaatatgagaacttgatctccattcctggtataggccttgtgacagccatgtgtcttcttacggaaattggagatgtgtcaaggtttcacaatcaaagagaatttgcgtcttttcttggtctgattccgtcttgccatagcagtggtgaaaatatttacaatatggaaaagactttcagaggcaataaacaccttggtcctttggttatagaaagtgcatgggtctctatacggcatgacagagctatgtcaatggcttatggagcatattgcaaacggatgaaagggcaagaagccatcatcaggatagcaagaaaaatgtcaaataggattttgagcgtactcaaatccggtaagaaataccaatatgacaaggtgcgataaaaatagaaccctattggaacaagataattaaaacgactcctacaatctccatgatgagtattgcgcttcatctaaagaaagattgttgcgtttatcctatagcctgaagtagtaacttgttgcttggtacaagacaccaagtcaacttatcgaagtttgtctgatagggattttattttagagtataacagcataagaaattaggacttgtgcgctgttgaggataaggatatttacccttatctaaagggggtattgtttctccttttgggaaaaaatcatgtaacaaattgatttataaagttaataacaaataaaaaagtattcagttatttggaatacaacatagaaggagattaatgtgtccaactaatcaaacgtacccgatgaagcatatattatcggatatataaaatgttcttcaccttccgtttgcggttgttcaaacaattgtttgtagataggttccgactctgtttcagagaaaaaatctgcatcagcaggataaataccataataccaccagggagttccttccatattataaggctcaataccctcgattacaaacttatataatccaactgtatcaccatcttttataatgcttgtataggttccataattggtccccatattatatctcaatccttttaaaggagcatattcttcttcagtaaactcgcctgctacatatttttttcttttgcatgcaaaaggaatctcatattttcctccatcaggagaaagaataaaaggattgggtccatcaacctctattgtatattcatattctactccgacttttgataacacctcgaccagttcgtatgcaatattactggcatcggcgggagggttgagcaaagttgtttttttcaccaataaggtgtattcataccccttgctataatcaaacccggcaattcctaaaaagtccaacgcttcatattcatttttaccttcctcctttaccaacatacaatcaatgaaatgatcacttccccaaggctggtaagtgccaatctcggaagagaccttcattttaatgttttctacattgtcttgtggagtatcactgttacaagaggtcacaccaattataatcaagagcgataaaattccgaatagttttttagttttcatagatttagttttataataatcgctcgcaaagatagtctttttcgtgataaaacatttttcgataagagtttttgttggaagaaaaccgtctattactcaaatttgttactgatattttataaaaagaataaaaaacattctcaatccattgctttttactatatttgcaaccaaattttctgttcacaatgaaaattaaggaattagtaagcgcccttgaacggttcgcgcctctgccattgcaagacggatttgataatgccggcctgcaaatcggattgacagatgcggaagcaacaggggctttgttgtgtcttgacgttactgaagctgtactggatgaagccattgcattgggatataatgtggttatatcacatcaccctctcattttcaaagggtataaatccatcacgggcagggattatgtggaacgttgtatcttgaaagccatcaagaatgacatcgttgtttatgctgcgcacactaacctggataatgcaccgggaggagtgaacttcaagattgccgagaaaatcggtttgaagaatgtccgtatcctggaagccaaggaaaatgcgctggtaaagctgaccacatttgtaccgaccgcccaagcggaagacgtgaggaaagccttgttcgacgctggatgcggcaatatcggcaactatgatttgtgcagttataacatggaaggcgaggggacattccgagcccgggaaggtgccaccccatactgtggagcgataggggagctgcataccgaacgtgaagtacgtattgagacaatcatacccgcctacaaaaaagcggcaactgtcaaggcactgcttgcggcacatccatatgaagaaccggtctatgatatttatcccttgcaaaactcatggccacaagccggagccggtgtcattggcgaattggaagtaccggagacagaacttgaattcctgaaacggataaagaaaaccttcgaagtagggtgtctcagacataacaaactcctcgggcgggaaatacagactgttgcattatgtggcggcgccggcgctttcctaatgccgcttgccatccgcaaccgtgcagatgtctttatcaccggcgagataaaataccatgactatttcggacatgataccgatatattattggctgaaatagggcattatgaaagtgagcaatatacgaaagaaatattttatacaataatccgggatttgtttcctcattttgaggttcagatgaccaaagtgaatacaaaccccataaaatacatgtaagtaaaatggctaaagaagcaaaaaaagatcctcaggaattaaccgtagaacagaagttgaaagctttgttccaattgcagacaatgctgtccaaaatcgatgaaatcaagacgttgagaggtgaacttccactggaagtacaggacttggaagacgaaatagccggtctgagtacccgtatagacagaatcaaggcagaagttgccgagttgaaatcctccattgcaggaaagaaagttgaaattgaaaccgcaaaggcttctgtagctaaatataaagaccagcaggacaacgtacgcaacaaccgcgaatatgacttcttaagcaaggaaatcgaattccagacattggaaatcgaactctgcgaaaagcgtatcaaggaatttgccgcacaagaggaagaaaaatctcaggaagtagcagaaagcactgctgctctggaagaaagacaaaaagacctcgacgtaaagaagagcgaactggacgaaatcatctccgagaccaagcaagaggaagagaagctgagagacaaagccaaagaactggaaacaaagattgaaccccgtctgcttcagtccttcaaacgtatccgtaagaattcacgcaatggactgggtattgtatacgtacagcgtgatgcttgcggtggttgcttcaacaagattccgccccagagacaattggacatccgctcacgcaagaaaattatcgtttgcgaatattgtggccgtatcatgattgacccggaattagcaggtataactcccgaacagaaagtagaagttgtaaaggaaaagccagtaagagccaaaagaaaaatcgtacatatcggctcagataattaaaaatagaacattttctatatataaaacggcaatagtaaagcacctattgccgtttttttgttaaataagctcataaaaacctgctattagagaaaaaagaagtagttttgttgcttgaaaaattaatagaattaaattaaaaagcatgagactaaacaaattattcatactctattcacttttcggaatattgatggcatcgtgcataaaagatgaagcacccaatgctgaagctgatataacaggcatctcttttgaagaagatgtactggcaagcgctcgtttcaatttaaatccgtcttacaatgataatctgcaggcctaccccatattagtaaaagtaaaagagggcactcctttaaacaaactatcccccctgtttgagttgacgccgggcgctaccattagtccggaaagtggtagtgaacacgatttctctgacggaaaaagggtaaagtataccgtaacttccgagaacaaggcttggcagcgagtatattccatcggtgtacgcgaacaatcggtatcagacatcccaaatgaattccattttgaagacatacgacttatcaatggaattaaccccaaatacaaatatcaggagttctatgaagaacaagacggattggaactgacatgggccagtggaaatgaaggattcaactgggcagccagttcatcagctactgaaaattaccctacgtcacaatatgacaatggtaaaaacggaaagtgtgccaaattagaaactcggcttaccggctctctgggagcaatggtaggtatgccgatagctgctggaaatttgtttatcggtgagtttgatatgacgaatgctctcaccagcccattgaaagccacacatttcggcactcctttctgttataagccctcacgtctaaaaggttggtacaagtacaaagccggtgaacgtttttatgaaaacggtggatacaccgaccgtaaagatgtgatgaacatctatgcaatcttttatgaaggcgaaagttacaacgaagcaggagaagttacggaagtaatattggatggaaatctgccaaaccagaactatgaacatcccagtatggtagctttagctctaatatccaatccccacgaaaccgatgattgggaagctttcgacattccttttgactatcagagatatggaaaagaaatagatgaaaccaaactggcaaaaggaaaatataaactaagtatcatttttgcatccagcaagaacggtgcaactttcgagggtgcgcccggaagtacccttttagtggatgatgtggaactgattttcgaataagaaccctgtagaattggaatacaacatgataaagaaaatagtagcatttatcgcattggcagtttacatgcaaaccgccctatacgctcaagagaatcagaatcgtacgcttataaacgctgccctgcacggatgggaatatgagataagggccggtgtcagcatcggtggtacttccccgcttccattacccgtagaaatacggagtatcgatgcctacaatcctactttagctcttatgctggaaggaaatgccatcaagtggttaggaaaaactaaaaaatggggagtaataaccggggtaagactggaaaccaaaaatatgattaccaaagcgacagtaaagaactatggcatggaaatcataggaaatgacggtaaccgcttgaaaggtaactggacgggaggagtaaaaaccaaagtacgcaatgcctacattactgtccccgtacttggagcatataaaatcaactcacgattgcgagccaaagcaggtgcatatgtatcctacctgatggatgaggaattctccggatatgtatatgaaggttatctgcgtgaaggtaatcctaccggaaagaaagtcaacttctccgacggtgccattgccacttacgacttttcggatgatttgcgcaagtttgcctggggcgtgcaagctggtgtagactggcgtgccttcaaacatctgagtgtatttgccgaccttacatggggattgaatgatattttcaagaaagatttcaatacaattacctttgccatgtatcccatctacttgaatgtgggtttcgggtatgccttctaagatactcgggtataccgagtaaatactcataaacaaataaaggtttaggttgttatcaatcccataaaaagataaccacctaaacctttatttatgaatataaaagtttggagcactgcgttgctcatattatgcctatgtcctgcggctatagcacagaaagccaaccgctatcttgagaagccactcccacaaggctggggaagggacgtctcccatgccattcccggagatgacaatctgttcagcggacagataccacccattgacgacaagtggtggaaagcattcgatgacccgatgctggattcactgattacagtagcctccactcaaaactattccgtactttctgccatggaccgtatggatatggccaaagccaacctgcggatagaacgcggcggctttttcccttccatctcattggacggaggatgggcgcggcagcaaagcagcggcaatgtcaacgcacttccgcaatccattaccggtgcatacagcgcctcgctcaacgccagttgggagctggacgtattcggaagtatccgccaacgggtaaaggcgcagcgggaaaccttcatggcaagcaaggaggaatacacctccgtcatggtatccctctgtgcccagatagcttccgcctacatcggactccgcgaactgcagcaagaactaagtgtagtgacccacaattgccatacccaggcagccgtactcaacatcaccgaagtacgctacaaaaccggactggtatccaagctggatgtctcgcaagccaaatccgtgttttacagtaccaaagcctccatcccgcaactggaggcaggcatcaaccaatacatcacaacgctcgcaatcttactcggtacttatccccaacatatccgccccatactggaaaaaccgggtaaactgcccgactacatggaacctataggcatcggcattcctgccgacctgctgctccgccgccccgatatacggcaagccgaacgccaagtcaacgcgcaggcggcaacacttggcgcatcccaaagtgactggctgccgcaagtgttcctgaaaggttccatcggctattcctcccatgacttgaaggacttgactaaacggaacagtatgacatttgaaattgctccaagcatcagctggaccttattcagcggtaccaaactggtgaatgccacccgtctggcacgtgcccagctcgatgaatccattcaccagttcaaccagacagtgcttaccgccgtgcaggaaacagataatgccatgaactcctaccgcaactccatccaacagattgttgccatgcgcgaagtatgcaaccagggagaagaaactctgaaactctccctcgatttgtacaaacaagggctcactcccttccagaacgtactggacgcactacgctcactcctgacatacgaaaatcaactggtgcaggcacaaggcagctccttgctgcatctgatagccttataccaggcattgggaggcggatatgaaatgaatcagaaataagaatataaactaaaccgaaccgtatatgaaaaatcaaatgtacatcaccctgctcatcctgccattgctggcaacgggatgcgggggaaggaaagaaacggcacaaacgatgcccattcccgagataagcgtggcccgtccgacagtgcagaacatcacgctgacaaaagaatatccgggctacctgacttctgaaaagaccgtagacctggtaggcagagtcagcggaaccttacagaccatcgcttacgctcccggcagccgggtacgccagggacaagtgctttttgtcatcgaaccgacagtctatcaagacaatgtgcggcaggcagaagcagaactcaacactgcccgcgccaacctggaatacgcccaaaacaactacacacgtatgcaggaggccgtgaaaagcgatgctgtaagccgtatacaagtgctgcaagcacaatccaacgtggcaacctcgcaggctgcagtgagcaatgcggaagcagccctgaacacggcacgcaccaatctgagctactgcaccgtccgtgcccccttcgacggcactgtaagccgtaacctggtggatgccggaagctatgtaggcggcagcgtgcagcccgtcacactggcaaccatctacaaggacgaccatctgtacacctacttcaacgtggcagacaaccaatggctctccatgctgatgcagcaaggggacagcattccccggcaagtaaccgtcagcctgggcaaagacgggcttctcacttatcctgcacaactggattatctttcgcccaacgtagacttgaacaccggaactctgaacatccgcgcccgtctcgacaatcctaaaggacttctgaaaagcggcctctacgtcagcatcatcttgccctacggagagcaacagcaggccatcctgctgccggatgcctccatcggcaccgaccagctggggaaatacatatacgtagtcaacgattcgaatatagtgcgctaccgccatatagaaaccggacaactgataggggacagcctacgccagataagggcaggcatcactccccgggaacgctacgtcaccaaagcgctgatgaaggtaagggatggaatgaaagtacatcccatcgacaactaatatgaattgattaataccaaagcctatgttttcaaaattcttcatagaccgtcctatctttgctaccgtattggcgctgctcatcgtcgtagcaggactggtcacactgggtatcctgcccattgcccaatatccagacatcacaccacccaccgtgcaggtcagtgccgtatatcccggagccaatgcgcagacggtagcacaaaccgtcggcattcccatcgagcagcaagtcaacggagtggacggaatgctttatatgtcctccaactccagctcatcgggcgcttactcgcttaccattacttttgccgtaggcacagacattgatatggctaccgtgcaggtccagaaccgggtaagcgtggcccagtcgtcactacctactcccgttgtggtgcaaggtgtcactgtacagaaacagtcatcgaacatcgtgatgttcctcacgatgacgtcggacagcaaagactacgacggactttacctcagcaactatgccaagctgaatctcgtagaccagttaacacgcgtgcccggtgtaggcgccgtcaatgtgatgggagcaggggactactccatgcgtatttggctcgaccctgccgccatgcgcatccgctatctttcgccggccgatgtataccaagctatccaatcacagaatgtggaggtcagcgcaggtaacgtagggcaacccatcggcacagacaataaaaatgcctatcaatacagcctgaccgtaaaagggcgccttacctcacccgaagagttcggcaacatcatcctgcgtaccgaaaccggagggaagatactccgtctgcgcgacgtggcgcatatcgacctgggctcggcctcttacagcgtagtatcccaactggacgggaaacccaccgctgccatcgctatctatcagcaacctggcagcaactcgctggacgtttccaaaggagtaaaggcaaaaatgcaggaactctcgcaaaatttccctgcaggcatacaatacaatgtaaccctggacactacggatgtcattcatgcttccatagacgaagtgatggtgacgttccttgaaacaaccctgctggtagttctcgtcatcttcctgttcctgcagaactggcgggcggtcgtcattccctgcatcactattccggtatcactcatcggcacactggccgtcatgtccttgttcggcttctccatcaatacgctgacactattcggactgatacttgccgtggccatcgtggtagatgatgccattgtggtggtggagaactccacgcgtctgctggacacggggcgctacacctcccgccaggctgtgaccgaagcgatgggagagattaccggacccattgtcggggtagtgctggtgctgcttgccgtatttatcccgacaacactcgtcagcggcatatcaggacaactgtataaacagtttgccttgaccattgcagccagcaccgtacttagcggattcaactcactgacccttactccggcactctgtgccttgatgctgcaacctacccggccttccaaaaatcccctatatcgggggttcaaccatctgtacgacaagacacaaggagtctacgaccagatagtggagtacctgctccaacgccctgtcgcttccatcgtttcatatgcggttttcacattgattgctgtcctgctgtttgtcaaatggccgtccacatttgttccggaagaagatgacggctatttcctcgcagtggtacagcttccccctgcatcgagcctggagcgcacccaagccgtaggaaagcagataaataagattctcgattcttaccccgaaataaaggactacatcggcatatccggcttctccgtgatgggaggtggagagcaaagcaatgcggccacttacttcatcgtactgaaaaactggaatgaacgcaagggaaaggaacatacggctgaagccgtagtacagcgcttcaatatggaagtatatggcatccaggaagcagagatatttgccatggtcccgcctgccatccccggactgggagctaccggaggcctgcaactccaattggaagaccgccacaacctcggcgccaccgagatgcagcgtgctgtagagaccttgatggagcattaccgcaattatccggcactggcatcggtcagcagccagtaccaagccaatgtaccgcaatattttttgaatatagaccgcgacaaggtacagttgatgggtatcccgctgaacagtgtattcaccgccttgggttactatatgggggaggcctacgtcaacgactatgtacagttcggacacatctaccaagtgaaattgggggcgggcgaccgtgcccagcgtgtcatcgacgatgttctgaaattgagcgttcccaatgcatcgggagaaatggtacctttctcttccttcacccgggtggaagagcagttaggcatggaccagataaacagatataacatgtactccacagcagccgtgacctgcaatgtggctccgggcagtagttcgggagagggtatccggcaaatggaaagtctaatcaaagagcatctcggagacgagttcggctatgaatggacttcggtagcctatcaggagacgcaggcgggaaccacgacgactgtcgtattcgtcatggcactgctggttgccttccttgtactcgccgcacaatacgaaagctggaccagtccggtagctgccgtaatgggacttccggttgcactgctcggtgccatgttgggatgctatgtcatggggactccggtcagcatctacacacaaattggaatcattctgcttgtcgccttgtctgccaaaaacggtattctgattgtggagtttgcacgtgactttcgtgcacaaggcaattcaatccgcgatgcggcattccaggccggacatatccgcctgcgacctattctgatgacatcgcttgcattcgtattcggggttatgccgctgctttttgcaaccggagcaggggcgggaagccgtattgcactgggagccgccgtagtgttcggtatggcactgaataccttgcttgccacggtctatattcctaatttctacgaattgatgcagaagttgcaggagaagttcagtaagaaacaatagggaggatgagctacaagttatggattatgggttataagctatcacacttatagcccataatccataactcattttagcaacttgctgctaaaagttgtatctttacgtgcgaattgcctcttacctcaaatccgcaactacgcgcctaatatgatacagaagcgaaaagaatctgcatcgttagtaaaaagggggcacagtgcatcgaatgtcaccataaagacatataaatgccccttaccccaccatgcgacttgaggcaatacgcaaaatcacgactataagttgtcggtgttatccaaagtcattctggaacacattggcataagcattgttgcatgaatagatattcagcacatacttccttgatgtcctgacccatttggctggcacagagatgaacttaaagacaaacgtcttgatgcggcttgttgctttgagtccgaacctcttcacgtcaagcctcgccatgatgaatttatagaagttgcgtatgagtgccataagcagaagaaacaccgtgttttctcccataaaggattttggaagcctgttccagccgaatccgttattcatatcatcgaagatgcgttccttccctccacggaggttatagaattcgacaatctctttctcggaagactcgtagtcatttgtaaggatgcagcggtaggtgtattctccttcccacaggtcgagttcgccgtctatccgcttctgtctttgaatcacaagacggtatgccttccctttccatttctcgatgagaatggaggccagctcaaactcaatgccgcccaattccactttcttccaacctctgagggcaaagatgtcattgtagagcgaactgcatcggttagcacggatatagaaggtcttgcagtgtttagcaatctcttccactatctcttcagaacacgagccgcaatcagctctgaaacggttgataataagcttgttttgttcaaacctttcaaagaacctcttcagcgtgtccttctggtggaaacggacatttgtgttgccgtcgctgttctcaatgccgacaatcaagttgccaataaccgccacgccagggcgataaccaaggaacttcttgtatgtaggcttcgcatcaaacttctcagcctctatgaactggtggtcgaagtcaacgtcatacccctcgccctctttcagctgccctgtggacaataggcaattgaggagcagtgtattcagcttgtctgccgtgttgaagtcgtaggtcttgccagtgtcggatgtgtaggaaatgttatcctgggtcagttcctttatggctctaagaatcgtgtcggcactgcatgtgcgaagtgtcggatgaagcgaaaggtggtacatcagatgagtggtgacatcctcgatgcatgagccgccacaaaaataaacgctcataagcgaacggatgatttcgctgtattgataaccatacagcctgcatctcataccgagggttgagtcgattacagatgagagtctggagtcaaattgctccattattgaaaatattcctccaaaaggagtgagtttctcggatttaattgctacctttgccatgtctgtcgggtttgatacatattttgatttgcaacactaagataggtgaaaaatctgacatggcaaattcctgagcaactttttgttgctcaggtacttaaaaagttatatttgtaatagtgttgcggaattaaggtcttaaagaaattgaagttatgaaagcatatttcatcgccatacttaccttattcacttgtatagctaccgtcgtccgggcgcagcaaatgtctgaacttgaaaaccagattgacagtctgctcaatggcaagaaagccaccgttggtatagccgtatggacagacaaaggagacatgctccggtataacgaccatgtacacttccccttgctcagtgtattcaaattccatgtggcactggccgtactggacaagatggataagcaaagcatcagtctggacagcattgtttccataaaggcatcccaaatgccgcccaatacctacagccccctgcggaagaagtttcccgaccaggatttcacgattacgcttagggaactgatgcaatacagcatttcccaaagcgacaacaatgcctgcgacatcttgatagaatatgcaggaggcatcaaacatatcaatgactatatccaccggttgagtatcgactccttcaacctctcggaaacagaagacggcatgcactccagcttcaaggctgtataccgcaactggagtactccttccgctatggtccgactactgagaacggctgatgaaaaagagttgttctccaacaaggagctgaaagacttcttgtggcagaccatgatagatactgaaaccggtgccaacaaactgaaaggtatgttgccagccaaaaccgtggtaggacacaagaccggctcttccgaccgcaatgccgacggtatgaaaactgcagataatgatgccggcctcgttatccttcccgacggccggaaatactacattgccgccttcgtcatggactcatacgagacggatgaggacaatgcgaacatcatcgcccgcatatcacgcatggtatatgatgcgatgagatgagagaggcaagggggctattggtagctcctcctataagttttgatactcgggtatatcctgcagaaaagtatagctgttgtgctcgtaatctatgcggcaacaataatgctgaagcccgttgctgacaatcagataatccactttcagcaccatgttgtagcgggtaatctggtcgaaaaccttttgggtgatttctatttcaggcgccttgtattccacaatcatccgggcggtaaggtcgcgtcgatagagcactgtatcacagcgtttctttgtaccgttcagctgtacctgcacctcatttgccataagcgcctgcggataccccttgtgagcaagaagaaagtggacgaagtgctgccgcacccattcttcaggggtcaaggcgacataacgacgacggattacatcgaaaataacattttttccgttccttgcggcaattttagcatcgaatgctggtaggtttaacgataacatttactacatttgtaagttaaataatggttcccgtcttttgggaacacaaatttaatgaaatcttatgaaaacaaaagaagaaatcgtagccaattggctgccccgttacacaaagcgtaacctggaggattttggagagtacattctgttgaccaacttcaacaagtacgtagagattttcgcagaaaagttcaatgttcccattctcggtaaagatgccaacatgatatctgccagtgcagaaggaatgaccatcattaattttggtatgggaagtcctaatgccgccattatcatggacttgctgagtgctatcaggcccaaggcatgtctgtttctgggtaagtgcggcggtatagacaagaaaaatagaataggggacctcatccttcccattgccgccatccgtggcgagggtacctccaacgactacttcccacctgaagtcccgtcactcccggcatttatgctgcaacgtgccgtttcttctgccatccgcgattatgcccgtgactactggaccggtaccgtatacaccaccaaccgccgcatttgggaacatgacgaggaattcaaagaatatctgaagaaaacccgtgccatggctgtcgatatggaaacggcaaccctattcagctgcggttttgccaatcatattcccacgggagcccttctgctggtttcagaccaaccgatgattccggaaggtgtaaaaaccgataaaagcgacaatctggtgacccagaattatgtaaaggagcatgttgaaatcggcatcgcatccttgcgcatgattattgatgaaaagaaaaccgtaaaacacttgaagttcgactggtaatccgttacgggacatccctcgtatagcacttactttattatatggcaaaacaagaaacaacctgtgatgatattctaaaagagttgagagccaagcaataccgccccgtctactatctcatgggcgaggaatcgtattacatagacctcatctccgactatattgtagacaacgttctcactgacaccgaaaaggaattcaacctgaccgtagtctacggtgcagatgtcgatatagccactgtcatcaatgcggccaagcgctatccgatgatgtccgaacgccaggtcgtagtcgtaaaggaagcgcaggccatccgcaacatggaggagctttcatactacctgcaaaaaccgttgaactccaccattcttgttctatgccacaaacatggggtgctggacagaagaaagaagctggcggccgaaatagagaaggtgggagttctattcgaatccaagaaggtgaaggatgcccagttaccggcattcatcacctcatacatgaagcgcaaaggtgtagacttggatcctaaagccacctccatgcttgccgatttcgtaggtacggacctcagccgccttacaggagaactggaaaaactgattataactcttccaaaaggtcagacacgcgtcacccccgaacagatagaacgtaacatcggaatcagtaaggattataataactttgaacttcgcagtgccattgtagaaaaagacatactaaaggccaataaaataataaaatattttgaagaaaatccgaaaacaaaccctatccagatgactttatctttacttttcggcttcttctccaacttgatgttggcttattatgcacccgaaaagacggagcagggtattgccagtttcataggattaaagactccctggcagtcgcgcgaatacctaagtgccatgcgccgttacagcggagtaaagaccatgcagataatcggagaaattcgatatgcagatgccaaatccaaaggagtaggaaattcctccctaagcgatggagatatcctccgggaattggtctttaagattctacattaacttccatacagcatccttttccataaaaggggaaaagcataaaacagactgatttaatatcattatgtcatttttagggggatttatcccccttttttctatttcggtccttagcatagacagtaaaataggagataataatcatatttacagtaaattacgttcatttataagctctgagaatcgtgtttttataacgaatcgaccaattatacagaaataaagcaaggatttaagtcttgaagactagaaaataaataaagcatcttatttatgtcacatcttttctcctttagtaaaaagaagagatggagcaattcagctttaaatcgtcatatatgaaatctgttacacttttcaagagtacaatagttgtaatacacaactaggataattgactattgtgaatttaatacattacataaatatctatatgacgggtgtattataacatatgtgatattacacttgaaaaacacaaatgtaataagtaatatttaatatcgcaaactgatggtttacaaaaataatagagtagtggttaacccatataattataagcaataaatatgtatatatcaattacatacgacgattaatcaaattattaaattatatattatataaaatgagcgacaaacaaatgtaatacagcatttaccatcaaaaaataaccatataatatgctaataactagacaaatatattattttattaaacttacgataaacacctattttactcgtaatttgtattatagcatttgtaatgatgaatattgtaataacagcatttcatttgtaaactttaaaatattacatttttaatttgcttttgtgatgtcatttttttacttttgtaatccaataaataacatgtacaattgtaataacacataaaccatgagtataaaagacaggttcaaaatggttatggaccgggagaaactgacagcaggagcttttgccgagagtatcggcgtggcccaagccaccatttctcacatcttgggtccgcgtaacaaatatccaagtacggaagtcattctccgattgcatcaacgatacaacgacataaacttggagtggctgcttaccggaaaaggtaatatgagtaataatccagattcacccgaaaacgatggattcgactatcctttattcgccgagaatccggaaaatctgtccaacgggccggaagaatctaaaaatcgcaaggaaattgcattagagacagccctaaaatcgcctaaagagattgtaaaacaagagattatctacaaagaaagacctcccagaaaaatcacagaaataagaattttctttgatgacaatacctacgagactttcaaaccggaaaattaaggaatgagaatggaaatagactaacgccccggcataaaaaagaaacgggttcattttattctgcactcggtttacactatctttgcacccgaaagaaaaacatccctctttatagatatgaaaaagtatattttagatctgacagtgacagagaacctccgcttgcatgccaactacgtgttgttgaagctgacttctccatccccacttccggaaatgcttccgggacaatttgcagagattcgcgtggacggctcacctaccacttttttgcgccgccccatctccatcaattatgtagatagacaacggaacgaggtctggttcttaatccaacttgtaggcgacggaaccaagcgattaggagaagcaaaagcaggcgatataatcaatgtagtgcttccgttgggaaactgcttcacaatgcctgaaaagccctcagacaagctcttattggtaggcggaggtgtaggtacagctcctatgttatatttaggcgaacagctcgccaagaaaggttgcaagccaacattcctgctgggtgccagaagtgacaaagatttgcttcaattggaacaatttgccgcctatggcgaggtgtataccaccaccgaagatggcagccacggagagaagggatacgtaacacaacactccatattaaataaggtgtgctttgagcagatatatacttgcggccccaaaccgatgatgatggcagtagcaaagtatgccaaaagtaaaggcatcagttgcgaagtatctttggaaaatatgatggcgtgtggcataggcgcttgtctatgctgtgtagaaaataccacggaagatcatttgtgcgtatgtaaagaaggtccggtttttaatataaacaaactattatggcagatttaagtgtaaatattggtgaattacaaatgaataatccggtgatgactgcatccggaacattcggatatggtgaagaattcgccgatttcatcgaactatcgcgaataggcggtattattgtaaagggaaccactcttcacaaacgtgaaggcaatccatatccgcgcatggcagagactccttcgggtatgttaaacgctgtgggactgcaaaataagggtgttcattactttgttgaacacatctatccccgcatcaaggacattcagaccaacatgattgtgaatgtttcgggttctgccatcgaagactatgccgaaacagccgcaatcattaatgaacttgacaaaattcctgccatagagttgaacatctcttgccccaacgtgaagcaaggaggaatggcattcggtgttaccgccaagggcgccgaagaagtggtgaaagccgtgcgctcagtttacaaaaagacacttatcgtaaagctctccccgaacgttaccgacatcactgaaatagcccgcgcagccgaaaatggcggtgcagacagtgtttccctcatcaataccctgctgggaatggctatagacgcggaacgcaggcgtccgatactctccactgtaaccggtggcatgtccggtgcggccgtgaaacccattgccttacgtatggtatggcaagtagccaaagcggtaaaaatccccgtcataggcttgggaggtatcatgaactggaaagatgctgtggaattcatgcttgcaggtgcctctgccatccagattggtacggcaaacttcattgatccggcggttacagtgaaagtggtagaaggaataaatgactatcttaacagacacggttatcagtctgtaaaggatattatcggtgcactcgaggtataaagaataacaagagatcgccattcgcaatatatattcataaaaaaggacattcattgacgaatgtcctttttctttttatttacatcagtaaacttactctcccaacaaatccggacgcaatctacgggtcctttccaacgactgttgcaactcccattccttaatcttggcctcatgtccggaaagtaaaatatccggaaccttccatccattgtaatcagcgggacgtgtatagaccggtgcggccagcagattgtcctgaaaagaatctgaaagtgcagactgctcatcggaaatcactcccggaatgatacggacgatggcatctgccatgacagccgccgccagttctccaccagtcaacacatagtcgccgatactgatttccttggtgatgagatgctcgcgaatccggtaatctatccctttaaaatgcccgcagagaatgatgagattctgggcaagggaaagagtatttgccatcggctgattgaactgctcaccatcgggggtcgtaaagataacctcgtcgtaatcccgctcggccttcaaggcgttgatacaccgctctatcggctctatcttcatgaccattccggcaaagccgccaaacggataatcgtctacacgacggtacttatcttccgtataatcacgaagattatggatatgtatctctgcaagccctttattttgagcacgtttcataatggaacagttgaagaatccctcaatcatctccggcaaaactgtgataatgtcaatacgcatataactttattttagctatttcaagctgcaaaagtacaaatattcggggagaaacccgtatttttgcgttcaaacaatccggaaaccctatgactgtaaaagaaaaaatagaccggctccgtgcggaattacaccagcacaactacaattattatgtgctgaatgctcctgaaatatccgacaaggagtttgacgacctgatgcgcgagctacaagacttagagaaagaacatcctgaataccaagatgataattcgcccacgatgcgtgtaggaagtgatttgaataagaacttcacacaagtggcacacaaatatcccatgctttcattgggaaacacttattccgaaagtgaagtgaccgacttctacgaacgggtaaagaaagcgttgaatgaggattttgaaatctgctgcgagctgaagtatgacggtacttccatctcgctgacttacgaggatggcaaactggtgcgtgccgtcacccgtggcgacggcgaaaagggcgatgacgtgacggacaatgtaaagacaatccgaacgattccactggtcctccatggggattatcctaaatcattcgaaatcagaggggaaatcctgatgccctgggtggttttcgaagaactgaaccgggaaaaggaagcacgtgaggaaccgcttttcgccaatccgcgcaacgctgcttccggtaccttgaagttgcagaattccaccatcgtagcatccagaaagctggatgcttatctctactatctattgggagaggaattgccctgcgacggccattacgagaatctgcaagccgccgccagctggggatttaaaacatcagagcacaccagaaaagctcacagcctggaggaagtcttcgaatacatcaattattgggacacggagcgtaagaaccttccggtagctactgatggtattgtactaaaagtcaacagcttgagacaacaaaagaatttgggattcacagccaagtccccccggtgggccatcgcatacaaattccaggcagaacgtgcactgacacgcttgaatagggttacctaccaagtaggacgtaccggcgcagtcactccggttgccaatctggaccccgtacaactgtccggcaccattgtgaaacgtgcctccctgcacaatgcagatattatcgaggggctggacctgcatataggcgacatggtgtatgtggaaaaaggcggtgaaatcatccccaaaataaccggtgtcgataaggatgcccgcagtatgcttatcggtgaaaaagtgaagttcatcacccattgtcccgaatgcggcagcaaactgatacgttttgaaggagaagcagcccactattgccccaatgaaaccgcttgtcctccgcagattaaagggaaaatagagcatttcatcagccgcaaagccatgaatatagacggactgggacctgaaacagtagatatgttctaccgattggggctgataaaggatactgcagatttataccagctcaaaaccgatgacatcaagaacctggaacggatgggcgaaaaatcggcagaaaacatagtcaacggtattgcggcaagtaaagaagtgccattcgaaagagtactctttgcactgggcatacgcttcgtgggagaaacggttgccaagaaaatagccaagtcctttacggacatcgaagaactggaaaacgcagacctcgaaaagctgaaaaacatcgatgaaatcggtgaaaaaatagcgcagagcattataacctacttctccaatcctgccaacagagagctggtggaacggctgaaatcgaacggtctgcaactccaccggacggaagaagacctcagcggatacaccgacaaactggcgggccagtccattgtcatcagcggcgtattcacccaccactcacgggacgaatacaaagagatgattgaaaagaacggtgggaaaaacgtcggcagtatctcctccaaaaccagctttatcctggccggagaaaatatgggacctgccaaactggagaaagcgcagaaactgggagtaaagattatgagcgaagatgagtttttggcattgctatcctaacaaatttccacaaaaagcttttttatggcttatatttgtagggtaaatcgaaaaaattcgtacttttgcgagtcatttaattagagattactttataatactcatgatacagacaagattgaaaggaatgggggtagcgctgattactccatttaaagaggatgaaagcgttgattacgatgcgttgatgcgtttggtagactatcaacttcaaaacaataccgactttttatgtgtgctcggcaccacggcagaaactccgactctgactgaagaagagaaaaagaaaatcaagaaaatggtcatcgagcgagtgaacggaagaattcctatcctgctgggcgtaggtggaaacaacacccgggccatagtggaaacactgaaaaatgacgatttcaccggagtagatgccattctctccgttgttccatattataacaagccctcacaagaaggtatatatcagcattataaggccatttctgaagcaacggatttgccgattgtgctttataatgtccccggtcgtaccggcgtgaacatgaaggcagaaacaaccctgcgcattgcacgtgatttcaagaatgtgatagccgtcaaagaagcttcgggcgacatcacgcagatggatgacatcatcaaaaacaaaccggccaatttcgacgttatttcgggcgatgacggcatcaccttccctctgattaccctgggggccgtcggcattatctcggtcatcggaaacgcgttcccacgtgagttcagccgtatggtacgtctggcactgcaaggggactatgccaatgcattgaccattcaccacaaatttgccgaattattcaagcttctgtttgtagacggcaaccctgccggagtaaaagccatgctgaatgtaatgggaatgattgagaacaagctccgcctgccattggtgccgaccagaatcactactttcgaagccatgcgcaagattctggatgaattgaacatcaaatgctaaggtcttataccgcccctataggatattaatttccagtatacaacatattaatatcagatatgcaaggagttaattttgtggaaacacggaattaactccttctttttttcctatgtgactatatttatcagtacaataatcccaaaacagtctactgattacgttataaagcaaaaagacatctggttaaatcgagaaaaagacatctctagctcaatcaagacaagactattatttcagctaatctattagttcacaacactgaacactttgtttcagcagagaaaaacactttgtttttatatgatggaacaaagtgttctgtcaagggaaacaaagtgttctccataatgaaacaaagtgtttagttaagggaaacagtttgtttcattatagagaacacgcgccagtgccatacaaggggagaacatgggtcaatgtaaaaacctgaggggtaaatttataaattattatctttgtctccaaattcatagcttatggagttaaacggttatcgccttcttcttcctgaaggcactttagagtactttgctcttgttgatgtgaaggaaagcgtaaatgaagttgtgatctaccttgaggaaaaaaatatcgttcctgagaagtatgcagatcaggatactgagagtaaaggcttttatgatcctgttattgttcaggattttcctcttcgtggcaagaaggtcttccttaatattcgtcgtcgtcgctggatcttaaagaagcataatgagtatatctctcgtaactggcgtatggtggctgaaggtactcgtatgacgcaagattttgcgtcttttttaaaagaactatattgatagctatccgatcagttgtaagctcttaggtgttttatatggagttgacggagatttattggagcgtcaataccgtaaccatctaagtggttatctccattgggaccaacttgttcatgcagaggattggctactattcgaaaagaatatcggtgcttatatctgtattgatgaggtagccctctcgcgtggagaactctatactgtactgatcaataaagaagctcacggtggtaaaggtagtatgattgctatcattaaaggtacggacgttcatacggtcacttctgtcctgcttaagctatcccgtctccgccgttaccaagtgcgcgagattactttggatatggctcctaacatggagcagattgcccgcatctgctttcctgcggccaaacgtgttaccgatcgctttcacgtacagaagttagcttatgaagcggtgcaggagatgcgtgtaaaagctcgctgggaggctttggatgaagagtccactcagattgcttatgcaaaggcctgtggaaagatgtatcatgcacctgttttcgctaatggagatacaagaaagcagttgttagcgagaagcatttatctgctttacaagaaggaatccttatggactcagtctcaaagaatacgagctgaaattcttttcaaggaatatcccgatataaagaaaggatattatctgtctatgcggttaggcttaatctatcatcagtgtaagtttaaggatattgctttgacaaggctggcaaggtggtatgatgaagtagataaatcagggttcctcacctttggaagggtcgcacgttctatacaaacacattatctgaatataatcaatttttttgaaaggagggcaaccaatgccgcagcagagtcattcaatgctaaaatcaaagcatttagagcacagttcagaggagtaagagatagagcttttttcttatatagacttgctaaattatatgcttaaatataaaatacctcagattgttacgttgacccgagaacatcaactatatgccattgctgtaaaaacaaagaacctccgcaagaaaacttgcggaggttctttgtgatcgcgacaggattcaaacctgtaaccggctgatccgtagtcagctactctattcagttgagctacgcgacccttaaaaaaattatgaaaacttgtgaccgcgacaggattcaaacctgtaaccggctgatccgtagtcagctactctattcagttgagctacgcggcctctttgtttaacgggtgcaaagatacgtactttttccgaattagcaaacgatatacaaactttttttgaagaaatttattcgacaaagcgataattaaacaactgccagccgatggtcatccccacattccactcccttctcggtgagctataatgatttacataagcagagatggctccgaagggcaaatgacaaataacagaaacttctcccatatactcaaagcgggagaatgcttttccataatatgctttattcaatgcattcttttttatcggaaaaatcggtgtaaagccataaaattctgtccggaactggaacatgtcgttcaaaacatatatgggtttgataccggcagccacatactggttggcacgaaaagcttcattgtacatcagtttactatgcggagtcggtgcaaattctcctgcctgcatcatggttgccgtataattctcagagaaattcttcgatgaatacagtgcttctgccatccatcccagggtgaatttcggccccatcgtgtgatatgcctctttcatataagagatttgtaaccatgattgccgctcttgcggagaaggactgtacccttcttgcggattccccggttcaaatctttccctcccggtaaatacctgggctatcagtttctccagataaccttttgtcgcgtattgccgcgtatttagggtgctcccatagaaaccgatggaacctcccaaaagtttgtaggtacttctgtccgaacggtccttatcgaaatctattacactggattgaaagtagttatcttccagttggccatatcccagactgaactccgcacgcttattggccaaaaacggcaaggcaaccatcaacttcacaaaacgttcgtcctttgaattgaatgaaggtttgtcattcctggaaaacagcttgtccttcttgtagtaatcgaaggtactgattgaagcaataaaacgaaaggacgtagatatgtgggtaggcaaatcaatcttacccatcaactgggcattattataaatcttacccaactgaccgtcaaaagtgatttccttggaataataattcaagttctgatatcctattcccaaatagatttgatttgagctcgtggtagagacactgccccccagacgcacggaaaaattatcctccatcttcaccttcaaatgcagctcatacaaatcggattccgaatcatacacagcatgaggaactatttccgaaatcatattatctgccagcaaacgaaaatacccgcgcttcaagtcttcataagtaaagacttcatgctcttcatcatggaactcttttttgatgtaggcttgctgttgggcattcgccccttcaataatgatatcccgaaaacggaattgaggcaggttactccggaagacaagacgcctcaaacgcacattatcagcattcaccctacgatgaacacggcttttgatggaatccatcatattaagggtacgattgtagcctatatcgtgcaattcctgcagacggtcaaaatccagcaagttgacatcatcatatttgaaggtcatgactatacccaacgagtccggaatggagtaatcggtcttctgcataatcatattctccaattggctcatcaggtcattctccttcggcttaccgggattggccgctaccacactgccaataatgacatccggatgaaaatcctcccgcatcacatccgtagggaaattattgtaaatgccgccatcataagcaagcgtactgtctatttctatcggtttgaagacaaatggaaagctcatggaagcacgtaccgcatctcccaaatcccctttactcaataccaatggctttttattgtacacatcggatgctatacagcgaaaaggaacaaacagtttgttgaaattaccgccacatgcagccgtagcacgtgcaaacaattccacaaataccaggttcatctgtatggggttgaccatgcttgtgggaagtatctggggctttatatgcagcgagtccctaaaagcaaaacggatattaaaaaattccggtgaaggacgattcttcttaaaataatactcgtatttaggctccactttgcccgaataccaacgcttaaagtcgggagagcgcaacagcgcctccatatcgtccggggaataccccatagcatacagagaaccgatgatagctcccatagaggttccggttatataatcaatggggatattattctcttccaaagcccggataatgcctatatgagtcatgccttttgctccaccgccactcagtacaagccccactttctgagcttgtaaaataaagccacatagaagaaacgaaaaaaacaataaaactcttttcataactatgctattccgagtaagataaatgttcattgccccaaatataaacaatagtttctaaaaatgccgtattcaacgaagaaaatcacaccctaattggtgaaaatgaataaaaaaagggtattgcgactccgaagaatcacaatacccttgcatatattaaatgcaaatttaaaggggcttattttattaggtcaatgcttctcttgacaaagttgttcaaagcttcacctttcaacataccattctgcagcagtgccaaatctatcagttgacggacaaccttattcttggcagcataatcggcgaagatgccttctttctgtgttttcagttcgtcccacttcttatccaactcattcactttatccttttcggcagtcggtatatcctcatctttcttgccttcctgcttctttttcaggtcagtacgctgcttgttcacttcatccatctctgcctgaaccggagcaacggcagcagcacattccttatcttcatctgccagaacttcttttaccagcttatggtctgaattcaataccaggttaaacatatccggcatttcgccatagaagctcattccagcctggatattcgccatttccttcatacggcgcatgtactcgctctgagttatcatgataggagtggcattttcgcccaaagcctgcgccgtgatgttgaactccgtcttatccatcttgggcaactggctcttgaagatggaagaaagaacttcctgcttgccggcttccaacgcttcgttcttcttgtcttccttgacaatcagattatcaataatatcgctgtctacacgagtgaagcgaaccttttcgaacttctgttccaacatgctcaccaccgcaatgtccagctgtccatccatcaacagcacattgtatcctttattcgtagcggcctctatgtagctgtattgttcatctttattgttggcatacagataaatcagatttccatccttatccgtctggttatctttaatcaacgtcttatactcttcgaaagtataatatttgctgtctgtatcggtgaaaagggcaaaatccttggctctatcatagaaatcttcctgcgtaagcattccgtagttgatgaagattttcaagtcattccacttttcctcaaactgtttacggtcattcttgaagatagactgcaaacggtctgacaccttcttcgtgatatatgtagaaatcttcttcacgttggcatcgctctgcaaataagaacgggaaacgttcaatggaatgtccggtgaatcgagcacaccatgcagcagggtcaagaagtcgggaacaataccttccaccgaatccgtcacatatacctggttgcaatagagctgaatcttattcttgttcaactcgatgttgctcttcactttggggaagtacagaataccggtaaggtggaacggataatccacattcagatgaatccagaataaaggttcgtcggacataggataaaggtcacggtagaacttcttataatcttcatctttcaattcgctgggtttcagcgtccacaacgggttggaatcattgatgatattatcctcggcagtttcaacctgcttgccgtctttccattctttcttcttgccgaatgcaaccgggatagggaggaagctgcaatacttcttcaacaaagaggaaatgcgcgcttcttcaaggaattccttgcagtcatcgtctatgtaaagaacgatatccgtaccacgttctgccttatcagtgtcttcaatcgtaaactccggactgccatcgcatgtccactttacagcctgggcgccttcccgataggatttagtgatgatttcgactttcttggcaaccataaaagccgaatagaaacccaatccaaaatggccgatgatggcgttggcatcgtttttatatttctcaaggaagtcattggcgccagagaaagctatctggttaatatacttgtctatttcttcagccgtaagacctataccatggtcggacaccgtaatggtatcttttcccagcgagacatgtacggttaaatcgccaacttcacccttgaactcaccgatagaggagagtgttttcagcttctgtgtagcatcaaccgcgttagaaaccaactcacggagaaaaatttcatgatcactatacaagaactttttaatgacggggaagatattctcagtagttaccccaatattacctttttgcatactacatttatattttttagatttatatttttaattattccggcagatatagcacaaaaaaaatgccagcccataaggactgacattttgacggtttttataaagaacagcttatgccttcctgatgctcagctcgtctttttctttgtctactgatacgtttaccgtatcacccggctgtaactcctccgccactatcagctcggaaagtccatcctccaagtggttctgaatggcgcgcttcaatgggcgcgcaccaaactgtacatcgtaccctttcgaagcaaggaatgtctttgcatcatcctccacaaccagcttgtaaccaattgcttcaacccgttcgtacaaacctttcagctcaatgtccacaatctttgtgatggcctccaaagagagctggtcgaaagtaatgatttcatccaaacgattcaagaattcgggagcaaaggtcttgttcagagccttttgtatcacgctgcgcgaatgttcattgtcatccgtgcggttttgcgccgcaaaacctacgccacggccaaattccttcaactgccgcgtaccgatattggaggtcataatgataaccgtattcttgaaatcgatggttctgccataattgtcagtcaaacgaccttcatccagtacctggagcaagatgttgaacacgtccggatgggctttctcaatctcatccagcaagacaatggaatacggcttgcgacgcaccttttcagtcaactggccgccttcctcatagcccacatatcccggagcggcaccaatcatacgagatacggtgtatttctccatatactcgctcatatcgatacgtatcaaggcatcggcagagccaaacatatattttgccaattgctttgccaaatgcgtcttacccacaccagtagggccaaggaacataaaggttccgatgggatggttcgggtctttcaaccctacacggctacgcaagattgctttggtaagtttctctatcgcagcatcttgagctatcaccttcgcctgtagttcttccttcattccggccagtttaagtccttctgcctgcgccatgcgctgtacgggtacaccggacatcattgaaataacattggctatttcctcttcacctaccgtttggcggtcatccttcaaacgggcttcccactcaaccttcatctcctccaagcggacagaaagttccttctcacggtcgcggtagctggcagccagctcaaaattctgtgactttacagcttcagccttcaggctacgtgcctcttcaatcagcttttcctgttcctcaatttctttcggaacattaatattcgtcaaatgcacacgcgaacccgcctcgtccaaagcatcaatagctttatccgggaagttgcggtcggttatatagcgtgctgacaacttgacacatgcttccagggcttcatccgtgtagctcacgttatgatggtcttcatacttctccttgatattcttcaatatctgaagcgtttcttcagctgtggtaggctctacaatcaccttttggaaacgacgttccaaagcaccgtctttctcgatattctttctgtattcatcgagagtggtagctccaatacactggatttcaccacgcgctaaagctggtttcagcatattggcagcatccatggaaccggcagcagcaccggcacctacaatcgtatggatttcatcgatgaaaaggatgacattcggatttttctgcaactcgttgatgatagagcggatacgttcctcaaactgaccacggtattttgttcccgccaccacagaggccatatcaagcatcaccacgcgcttttcaaacaaaatgcgcgaaactttcttttgcacaatacgcaatgccaaaccctctacgatggcagattttccgactcctggttcaccgataagcactggattgttcttcttacggcggctcaagatttgcgccagacgttcaatctcgcgttcgcgacccacaaccgggtccagcttgccttcttcggcagcccgcgtcatgtctacgccgaaattgtccagcacaggagtatcattggacggctttctggatgcagcctgtgcagccgaagccgaaccagcccccccagtacgggaggagcgagacatattcatatcttcttcatcctcttcatcatcctcggtgaatcccattcccgcattcggattggtcgatttcatcgaaagctgttcaaatacagcctgataatccacccggtgttcttccaaaacagttgcagcaagattgtcgccatctttcaaaatagccagcaatacatgttccgtatcggcagttgcacttttcagcaaacgcgcttcaagcatacacatcttcaatatcttagccgtcatcggggacaagggcacttcagcgtccggcaagagagtatcgtcctcggcatcctttaggaaaccctccagacgactttttactcgttttaaatctatatcaagtttcaacaatatttcaatagcttttcctccgccatcacgcagcatgccgagcagaaggtgttccggaccaatatagcgatttctcaatcgattggcttcttccttgctataagtaattatgtctgaaactctttgtgaaaattgattgttcatattttataattctcctcaattaaaaaggttatccacgacaaagatacgcatttattaattcagcgtatcatatttaactgatttaatagtatacaaatcccgtgccataaatttcaaatctgtttttccactttacaccttatatattaatagcaatttggtgaggaagggagggagtacttccatatttatgttgcaggcaacaaagtttatggaggaaaacttttgtatatcgtaaaaaagcagtactttagcgtggtttttcacgaacccgaaaatgtataattaataatctttttaaatgcttgaacaagacagaattataaagattaacatcgaggaggaaatgaagtcatcgtacattgactactctatgtcggtcattgtttcacgtgcccttccggatgttagagatggttttaaacccgttcaccgaagaattcttttcggaatgatgggattaggaaatacctccgacaaaccttataaaaaatcagccagagttgtaggtgaagtattaggtaaatatcaccctcatggcgacttgtccgtttacggagctcttgtacgtatggctcagccttgggcaatgcgttacatgttggtagatggacaaggtaactacggttcagtagacggtgacagtgctgctgccatgcgttatacagagtgtcgtttgcgaaaaattggtgaagacatgatgacagaccttgagaaagagactgttgacatgcagaacaatttcgatgactctttgcaagagcctaccgtcatgccggcccgtattccgaatcttttggtaaatggtgcatctggtattgccgtaggtatggctaccaatatgccgacccataatctatctgaggttattgacgcttgtattgcatacatcgaaaacaatgacatcgatatagaagagctgatgacgtatgtcaaagctcctgatttcccgaccggaggctatatatacggtatgagcggtgttcgcgaagcctatctcacgggacgcggacgtgtcataatgcgtgctagagccgaaattgagactggttcgacgcacgataaaatcgttgtgacagaaattccctatggtgtcaacaaagctgaattgattaagaatatagccgatttggccaacgaaaagaaaattgaaggtattgccaatgctaatgacgaatccgaccgtgaaggtatgcgtatcgttattgatgtaaaacgtgatgcaaatgccagcgttgtactcaacaagctctacaagatgacaatgctgcagacatcttttggtgtgaacaatgttgcattggtacatggccgtccacgtctgctgaatctgaaggatttgataaaatacttcgttgagcacagacacgacgtagtcatccgccgtactcagtatgatttgcgcaaggccaaagaacgtgcacatattctggaaggattaatcattgcatctgataatatcgacgaagtaatcaagattatccgtgctgctaaaaccccgaatgatgctatatcaggtttgatggagcgattccaactcagtgaaattcagtcacgtgccattgttgaaatgcgtttgcgtcagctcacaggattgatgcaagaccagctgcacgccgaatatgaggaaattcagaagcagattgcttatttggaagaaatccttgtcaatgacgaactctgccgcaaagtcattaaagatgaactgattgaagtaaaagagaagtatggtgacgaacgtcgctcggaaattgtctattcatcagaagaattcaatccggaagacttctatgcagatgatgaaatgattatcaccatctcgcacatgggatacatcaaacgcacaccgctgagcgaattccgtgcgcaaaaccgtggtggggtaggctccaaaggtaccgaaacccgcgatgcagactttgtagagcatatttatcctgcaaccatgcataataccatgatgttctttacacagaaaggtaagtgttactggctgaaggtatacgaaatccccgaaggtactaagaattcgaaaggtcgtgccatccagaatttgttgaatatcgactctgacgatgctgtaaacgcctatttgcgcgtgaagaacttgaacgaccaagaatttatcaacagccattatgtattgttctgtactaagaatggtgtcattaagaaaacattgcttgagcagtattcacgtcctcgccaaaatggtgtaaatgctatcactatccgtgaagacgaccgtgtaatcgaagtgcgtatgacaaacggcgacaatgaaatcatcattgccaaccgtaacggacgtgccattcgtttccatgaaagtgctgtgcgcgttatgggacgtactgccaccggtgtacgtggtatgacattggatgaagacggtcaagacgaagtagtaggtatgatatgcatcaaagatcctgaagcggaaacaattatggttgtatcggaacaaggatatggcaaacgttcggatattgaagattatcgcaagaccaatcgtggaggtaaaggtgtgaaaacaatgaatatcaccgataaaacgggtaaattagtaactatcaagtctgttacagatgaaaatgacttgatgattattaataaatctggtattaccatccgtctgaaagtcgccgatgttcgtatcatgggacgtgctacacaaggtgtgcgtctaatcaaccttgagaaacgtaatgacgaaatcggctctgtatgtaaagtcacttcagaaaatgaagaggaacttatagaggagggggaagaaaatacccttgaaagccctcagaacgaggtaaacaatgaaaatgaagaatagacataatattaatttaaattttctacaatcatgaaaagagtattattttcaatggttttactacttgtcgcaagctttactttcgcccaagaaaagaacgtaaaagaggctaaaagtattgctaacggagtaaatcctgactttgccaaagcagaggaactgataaatcaggctttaaccaatcccgaaacaaaggacaatgccgaaacgtgggatgtagcaggtcttatccaaagaaaaagaagtgagaaagaaatggaaaatgcctatctgagaaaaccttatgacactcttcaggtatataatagcgcattgaacatgtgtaaattctacttcaaatgtgacgaattggcacaaattcccaatgaaaagggcaaaatcaagaataaatatagaaaatctaattctgctacaattttagcagaacgcggtaatctaatcaatggcggtatccaattctttaatttggcctcacagaaagaaggcgatgcagccaatgaagacaataaaaaagcattagatttctttgcaacatacattgatattgctatcaacccgatgtttgaaaaggaaaatctattacaaacagatacagtattaccccaaatagcatattatgcaagtttagcagctgctaagatggaagattatcctagtattttgaagtatgctccttatgcgcaagatgataaagaagttgggaaatacgcaatggaatttatctctactgcattgaaagctgaaggtgatactgttaaatggattgcttctttaaaagaaggtatccagaaatatcctgaacattcattcttcttcggtcacttgattgattattatagcaataacaacaaatatgacgaagctatgcagtttgctgatgatatgttggctaaagatcctaacaatacattctatttgtatgtaaaaggctacctttatcacaatatgaaggactatgataaagctattgaattctataaaaaaactatagaagtagatcctaattatgcagaagcatactctaatttaggcttgatttactgcttacaagcacaagatttctcagaaaaagcaactacagatattaatgatccgaagtataaagaagaccaggctactctgaagactttctatgaaaaggcaaaaccttattatgaaaaggcaagagaactgaaacctgatcaaaaagatttgtggttaaatggtctgtatagagtgtattataatttgcaaatgggccctgaattcgaagaaattgaaaagttgatgtaatactttcataataataaaagcctaattaaattattaattaggcttttattattgttatatcattaagtaaagaatgttatttcttaagtgagggagagaagaaattaaaattagattaaattattccagcgctatattaaacataatgcttatattgaacagaaaccatattatccatattcaacacctaattcggtcttccataaattaccaacaatggtgtatcagaatggaaaatcatctttctggcaatgccagggttaaataagcgcgaaaatatatttcttttataagaagttaatgttataatatcaatatgattacttttgatataactgtctaaactactaagcagattatcgttctttaccacatcatagtatatttccaattgtggatattgtttttgaaaatattccttaataccagccagttttatttcattccatgtattctgaacatctgaaagatgtatcagagacactgaaaacttaaatgatttcagattatttattagcgaatcaaaagctattaaatcacgttgatcaaaattagtaatgaatgcaatacgcttagcttcagaaaattgcttgaatggagtattttcaggaatggccaataccggtacacggctacgttcaatcacttcagccgttacactgccgatcaaatcaatatccttctgacttttaccacgagttcccattatgataatgcgtggccgatattccttggtatagcggagtacctcttcttcaggaataccttcacgcaaaacacaagtatatttaatatctggaaactcgccggaagctaccttctcttttactttatcagataatgcattcaaatcagcatgaactttttgtaagatactccttacattctcctcatcacttagctgatagttaaatacgtctccgtatggcaaagaagttgcatatataggagtaaaataaacatgtagcaaaacaacttctgcacctatattctgagcgaaattgaaaccgaactcgcaagccttcaaagaataattggaaaaatccactggaatcagcactttattactaaccttctccagtttaggtgacttcccccccactacctcttcagataaccacgcagagctttcagtaattttcagagcatgaggtaagtcactctccttaatacgtacacgtacgccagaagaaacaaccggttgtatctggtttacattgtgaatataagtctcaataccttcattttcaagaacatttttcaatatttgagctttcgcgtacgttaagattgccaaagtaactaatttatcttccatatatcattgattttgagattaaaacaaacaagaaatcccaattgttgtcagcaattgggattctatctaactttctcttcttaagctcgaacagcttcttcagtcttacctgccatttcatctaaaatttttaaagctcgctctaaaacagtagtatcatcaatcataaccaatccaccatctggtccaggttccaagtgaatcccaacacttttcccctccttaaaattgtgtccaccgaaaaaatttcttacagtgtcaacattcagtccaagttcatcggctattctatgcatactaccactaggcaatgagtctttaatcttacgtaattcattaaatgttattgttctcatattcataaatttaatggttaatactctgtactttttattatcacgctataaacttaaggaaaaaaaaggataaaacaaactatttctttatcttttttcaaaaagaatattgcctctccaaaaaataatcattttcaagtatgcagaattataagtacagagaaaaagctcctaaaaatagacagaaacagctcgtataaagcagaattatcgggtttatacgagctgtttttagaatacagggaaaatttaaataccttctatggcagaagctggaacccaccctactttaccatcttccaaacgaatttctttccattcacgcatagagttgtcttttatctcaactttacgtccctcatgaagaatgaacagacttgtaccactttcactgggagtactacgcactgtgacactaggtgccaacactatagcttcgttacgttccatcagttcgcctttttgctgagcagcaaacacattactcaatataacaagaacctggaatactattcctgcaataaatcccactttctttcccgtaatctgttttgaaaagaaaaagagatagaacgaaacgagtaatagtacaaagaacacaatccccaacttagcccatgcgtctacgctaagacaattaatcaacgatttagtccaagatacaaagaaaacctcaggaattgggattaccttatcgattgtcttagaacgtgctatctccaaatttgcacgaatatcagcattaccaggttccaacaacaaggcacgctcataattcaatatagctcttgctatatcatctgccttataataactgttgccaagattataatagacctctgcagcctctcccttctttaacagattctcatatatttgaatggcagaagcataatcattccgtatataagcgctgtcaccttcagcctttgtcacattgctttcttgccttgcagcagagaattccgcatgtgaaccgacggatgtagagtcactagcagtctgtaatgtatctacagatgcagaattctgcccataggcagtaattgccatcactagactaagagtaaaaaacaatattttattcattaccatttcctcctgattaatgttttatcgagttttccattttactgataacttccaaagaagctgaatataccttatccatagcctggttatcatcacccggagcaaagcgggcaaactcacagttattcaatgcatcgaggaattcctttatcaacgcatcattcacaccataattacgaagttcctcttcgatattatccttagacaaacgggataccggaatgttcagtttatcactgatatacccccaaagagccttcaaaacctcatcataaaacgcatctttcttattctcaaccaataatttaccagcttgcttcatacgtttcaccgccactttattggctttcttggtacgcatctttgctacatttgcattggctgctatttgcttacgatagatgataaagaatgtaatgaatgcaatacccggtatcaaataaagtaaccaatacgtcaacgaaccgaagaagaaatcacctttgggagacagagtaacattattctgcttgataaaacgaatatcctcgttcaatactttcaactcttccttgcttgtaaagtttgcaatagtctgagcagcattgcctgctcccttttccacatgcaattcatactcttccgtagtcaacgttttatacgaacgggaattaatatcaaaataactgaactttacggcaggaatcttataagttcccgcattacgaggaattgccagatactcaatgaccttgctaccggagaggcccgaatttgtcagacggaatttattgtccaccttcggatcatatacttcaaaatcctcggggaatttaacctccggattagagagcaatttcagattaccggtaccagaaatgacaagtttgacagtaacagcatcattggtcttgacatttgtactattgatagaagaagttatattgaactctcccactcctcccgaaaaatcggctggcttacctgccggcaagggctttacgtcaattgtcagttgcggagtcaaaattgtctttttaacttctacgtaattgcttcctccattgaaaaatgcctcgaacggatcagcaacttgtgtagcctttgcaatggaagcatcaaagcgtgctgcatcaattgtcagcttaccggcttgttgcgggaacaacacaaactgacgatagattgtagactgataatttctacctttataatgctccaatccccatcttctgtcattaggcaattctacttcctgagaatggaatcctttgaagtcaggcaatttcacattatcaaacatacgtaagtccaccaaggtatatatcttgtatgtcagcagaaaagcctcttgttcatacaccgtcatcttactggcagtagctgtaataaacaaatcactattcgatacagatgtcccggaagaagcgcggctggcagtgccctcactctgtttgccaccatttccagaagctccattagcagcctgatctgccggaagaacccttacttgtacagaattcgaaaccatttggttaccatcagcagtgatagtggctcctggaatagtaaaatcaccttctgcagtcgccattaaaatataagtgaatgtaatactgctggttgaagtcgtctgcccattaatcatctgcacgctactctgttgcgagcggctgggccccatcaacacatcaaatcccttcatagaaggagcacgaaagtcccttaccttttgtgtagtcaccgtatacgacagtctgaactggtctcctaccgccacagcgtcaggagcggacgcagtaaacgataccttgccatcggcaaaggcattcatactgactgcaatcagtgctatccataagaaaactatttttctcatatattattcctattatgtttgttaccaatctttttccagacgacctccttgaagtacctgctgctttttcactttatcctgcacatccttctcgtcttgcatgacagagtttaacagctgctcggcattttccttagacatctcattatctttcttttccggctgagaaggttgttgttgctggtcttgattctgttgctggtctttctgctgatcctgctgtttatcctgctccttctgttggtcctgtttatcctgatcttgattctgatcctggttctgctgctggtcttgcaattgtttctgtgccaaagcaaggttatagcgcgtttcatcatctttcggattattgcgtaacgactccttataggcttctaccgcctttgcataatccttctgagaatgaaagatgactcccatattatgataaatctgtgctaagttcgatttgtccttttctatcttggtagctcccacatattgctccatcgcttcctgcagcttgttctgctgggtcaatgtatttcccaggttgaacatggaaaccgttgacttcgggtttacctccaaagccttccgatagttcacttctgcatccacatatacgctatccttaaaaaaacggtttcccttacggatataatcgcgttccgccttctgtgcagaagctgaagctgccactaacagcagcaaaactattccaatatattttttctgtaacatacgcatcatttcttattagagaataaatgaatgttgcggaacagaggattcttgcgctccaatatcaacatctcagtcagtaacaacagcagaataatccatgccactgcctgaaactgttcattgaattccgtgtacacctgtgtttccacatctgcctttgccatcttgttgatttcctgactaatcgctttctgtgcaccattggtattgtctacgcgcacataaataccatttcctgcctgagcaatttcctgacacatctgctcattcaagcgagtaacgattacattaccttcacggtcacgacgataatcattagtaccctctattggaatgggggcaccctcgggcatacctacccctaatacattgacctggatacctttctctgcagcagccttagcagcttctacggcaccaccttcatggttttcaccgtcggtgatgacaataacagtacgtcccactccttcttgaggtgtaaaactccgggcagccagatttattgcagctccaattgccgtaccttgcttggaaatcagcgaaggatcgatggactccaaaaacatcttggcagaaatataatcactcgtaataggcaactgggtaaatgcgtcacctgcaaaaacaatcataccgaccttgtcattctgcatcttatctaccaactgcgccaccagccgttttgccttctgcaagcggcttggctgtacgtcttgtgccagcatggaattggatatatccaacgcaatcatcacttccactccctggcgttttaccgtctccagtttggaaccaaactgcggacgtgccagcagtaccgtgaacaacccgatagccgcaaaaaccaaccaaaacttcacatccggacggtatttggaaacatccggcattagctgtgccatcagtatagggtcaccaaatttacgaatggctttcctcctccgataattggagtacaagtagaaggccgccaataaaggcagcagcagcaacaagtacaaatatgcaggttcttcaaatcgaaacatctttttatttacaatttagcaatttacaatttacaatttggctacgcaatgactgatacactaaaagacattctccgtttttacggtatcttcttcaatatagagttgcgtaacagtacctccagtaataagcacaagaaagcagccaacgcaaaccagcggtactcttcctggcgcttgctgtattcttttacattcaattttgttttctccagcttgtctatctcctcgtacacttccttcaacttcgagttgctggtggcacggaaatagttaccttccgttgttccggcaatctgtgtcaaagtcttttcatcaatttcgacgggcatattgacatattgcactgttccgcctaccggataaggataaggagccataccattggttcctaccccaatagtataaacgcgaatgccaaaactcttggctatttcagcagccgtcaaaggagaaatatcacctttattattgacaccgtccgtcagcagaataatgactttcgactttgccttgctatccttcaaacgggtaacggcattggcaatacccataccgattgccgttccgtcttcaatcagcccgcacttcatatctttaagcaagttcaacaatacggcatggtctactgtcaacggacattgcgtaaagctttctccagcaaacaaagttatacctatattgtcattcggacgtccgttaataaactctgccgccacatccttcgccgcttccaaccggttaggtttcaggtcttcggccagcatactggtagaaacgtccatagcaagcatgatatcaataccctcaatctcactgttctgccagctatcggtggtttgcggacgtgccaaaacaagaataatcagtatcaaggcaattatccgcaatacaaacggtacatgcaacaaatagttcttatagcttttaggggtatgggcatacacacgggcatccgaaatctgaagcgtagcttcactattcttccgcttcataatataccatactatataaggtataagcaacagcagcaaaaataaatattcaatattggcaaaaaccatatttatgtacgatttaacgatttacaattcagcttcgctccaaacatccctcacttttcactcatgtatatccgattgaagtcacttttcctgtattaagcaaaataattatacaactccaatccgatatatatcaatgaactgacaagggctacagccaacactacaatacccgttcccagcaaaatcttggtacgcaaagaacgtttctcgataatggtaatctccgtaggctgcggcttggcattctcctcttctttctccttggtttcattaataaagtcaatggcattaatcaggttagcgtcattttcgttcatcaatggattatgcttggcaaatttcaccaaatcagcagtctggaacaattcacgcaaatccgatattgcttccttatctttcatttccagcaacttatctatgatttccgtagaagtcatttccaaagcattgaaaccaaaacggtcttttatatatgtacgaagagtatcggtcaattccgtataatattccttcggttcccctttctgccataccttctcattcttgatacgttctatctcctgcatagccaactgatggggaggcagcttaggttctaccttcaccttacggataataggcttattgtcgaagaagcgcattatcagatagacaagtaatatccctatcgggataatcagcgcaccacaagccataagaccataccagtcttcccaggcaaaaggcgcttgcatcactgttttgggaccgaagaactgttccggattctccgggtctaacgggacattcaccgaatatactttcaaggccaacgctttggagcgatacttctcattatccactgtcacttccataggcggcagataataaagagccgagtcgaaagaggtaactgtatactcttgagttatcaatgcacgccggccatcattcagcagttgcgtatccggcttggccacatcaataatttcaaccccattcaccagcgtatcggtatataccgggaatatggcacgcttatcggcatccagagatacttgaagctttatctttgcctgctctccaataagaatctgcaaagagtcaatcgtagcatctaccgttaccgactgggctactacccttcccgaccatgctatcaataacgctatcagaaataaatatcttttcattttccgattaatttcgtttcgcaaacaaattcatcaatgccttgacataatcctggtcggtacgtaccgacacattgtcgacattactcttggtaaacgtttcattcaattccgcctgcttgttcacccaccaatcatgatgggcacggcgcacggcacgcgaggaggtgtcaatccactgctcatgtcccgtctcggcatccctaatcttcatcagtcccacgggtggcaattcttccacacgacggtcgtacacctgaacggcaaccaggtcatgcttacgattggcaatggtcatggcgttcttgaaactttcctggtcgatgaagtcggacaagacaaatgccgtgcaacggcgtttcatcacattcgtcagatattccaatcccaaacggatgttcgtcctccggctttccgcatgaaaatctatcagttcgcggatgatgtaaagtatatgcttacgtcccttcttgggcggaataaacttctcaatccggtccgaaaagaagatgacaccaatcttgtcattattctgaatggcagagaatgccagtgtagcggcaatttccgtcaccatatccttcttcatctgctttaccgtaccgaactccaaactaccggaaacatctaccaacaacatcactgtcaattcgcgctcctcctcaaacaccttgacgtaaggcttgttgaagcgggcggtcacattccagtcaatgtcgcgtatgtcatcgccaaactgatactcgcgcacctcggagaatgccatacctctacccttgaaggcagagtgatactgcccggcaaagatattgttggacaatccgcgcgtctttatctcaatctgacggactttcttcaaaagttctgttgtttccattgatttattttaataatctcatttaagcacacaagcgcaatttagtttataacagaaacttccctatgaaaaggggtgaggttttcggtactcaaccctaaggtttacgacgctaaacctcaggtataggattgtaaacctcaagtttacgaaaacctctattatgcgttagggcacttcaaccttgttcagtatcttgctgacgatttcatcagatgtcatattgctggcttccgcctcgtaagtcaagccgatacggtggcgaagtacgtcgtgtgccacagcgcgcacatcctccggaatgacataaccgcgacgcttgatgaacgcgtagctacgggcagccaaggccaagttgatggaagcacggggcgaaccgccgaaaccaatcatgtctttcagttcttttaaatcatatttttccggataacgggtagcaaatacaatatcaacaatatatttttctattttctcatccagatacacctggcgaaccactttacgagcttcaataatttcgtctgccttcaaaatgggcttcacttcaaatttatcaccattgatattctgacggataatcagtttctcctcttccagcttcggatagtctattacgactttcagcatgaaacggtccacttgcgcttcgggcagcggataagtaccttcctgctcgataggattctgtgtggcaagcaccaggaatggtttgggcaacccgaaagtttcattgccgatagtaacttgacgttcctgcatggcttccagcaaagcactctgtactttggccggagcacggttgatttcatcagccaaaacaaagtttgcgaagaccggacctttttttacttggaacgtttcatccttctggctgtaaaccattgtacctattacgtcggcaggcaacaagtcaggcgtaaactgaatgcggctgtattgcgcatcaatcaacgaagcaagcgtcttgatagctaaagtctttgccaaaccgggcacaccttccaacaacacatgtccatcggacaacaaaccaattaacaacgactctaccagatgcttttgtcctacaatgacctggtccatacctgtggtaagattggtaacgaaagcactttgtctttcaatccgctcattcagttcgcggatgtcaattgtttcagccataaatcaatctattttttaatgtttaatttcttcatttatccggttttgaaccggcaattatttttttcgctcccaaaagtacgggaataaattaaccataccaactaatttttattaaaaaactatgcgaaaccttttagattaaactactttcatagagtttagtatttaacaaaaaagaagcagtaattttttactgcttcttggctaatttcggtatcttgatagtggtaccataaggtacattatccggattcttgattacgccgggattatgcttcacgatataaggccaaagcgcttttgtcccataaaaacgaagcgctaccctagtcagcgtttccccttccttgatggtataagtggtttctgttcccacaatcgtataccccacagaatccggttcaaacggtgcaactgtctttttctgctcttttttaggagcgggagactgtgcctgtacattttcctttggagttgttgtaagcgcaggagttgttgtagcaacagtttctgccacagtatctgtccgggcaggaactacaacatcttttgaaacaatgctgtctgtcaaggcaatattgtcttgaccggcagggacatccaccttttcagtaacagattccttcacatccgagtctgcaacctcttctacaagaggctttgcagtaagtttgtcaagcaagtccggataatacatgaaagctacggcaccaccacacaacaacactacaaatacaacgatgcctataaaatatttcatagtcgaagaatctgccgtatcttttatcactggctcagacggttccggttcaactgcaactatattttcaggcattgcttcaggttcagttttttccggtttctcctcttcaacttccggttcgggctcaactaacggctcttcgactacagtttccaccaaaggttcttctatcgtggcttcttccactaaggcaaccttctcctccacctcttgttccggagttttgatttcagtatcttcatcatcttcactgtcattttcctgcagggtgtcctcaagcaccgtagcgtcattcaaaactacagtttcaaaatgcgaaaatggtctattgataatatctttcaaagccggttccggtgtaaacgacacttttgtatgcccttgtatctcaaacctttcccccgtattcacattaacgctttcacgactcccgacatctatcagcttgaaagtccccaaacctcgtatcttcacatatttgtccttctccaaagactcctcaatcagctggaagaattctttcacaaaactatccgcattcttcttgctcatgccatgcctttcagccagcgtgtcaatcaggtcttgtatgttcagtttctcgttcataatacgggagattttttaaaagccggttacttaaacttatcctttaacaatgtactcggcttataggtcaacaccaatttgggaggcaccagcatacgttgctttgtagtcggattcacagatatacgctctgccttctttttcacttcgaatgtaccgaacccttgtatagagataatattcccctcctccaactgccgtgtcatatctgccagcaatgaagcaaccagctcagaagtatctttcaatgtgtaccctaacctccgcgacaattcagaagtaaactctttgttattcaaaatgtaagcctttaaattgaactacggtgctatattagcaaatcttcttcacatatgcaagaagataaggaaaaatctttaaattattcgtccaaaaaggtcgaaatcatcggaatttactatctctacgtggtaaaagttacctatatgcaacgccctgtctccacgctcaatcaaaacctcaggatccacttcgggagaatcaaattctgtacgtccaatataatattcgccttccagccggtcaatgattactttcatctgcctgcctactttctccgcactcaactcccctgaaatgccttgttgaatagacattaactcatccaagcgcgcttgtttcacttcctggggaatagaatcctcatattcagcagcggcatacgttccttcttcttccgaatacgcaaaagcccccattctatcgaaacgcactttacgaacaaactctttcagctcctcaaaatcggcttcagtttctcctggatgccccaccatcagtgtagtacggagatggataccgggaacctcctcacggaattgttctatcagcttatacgtctcatccttcgtcacatggcgacgcatcttttgcagcatattgtcactgatatgttgcagggcaatatccatatatttgcatacattgtcacgctcgcgcatcacacggaataaatcagccggaaaatgtgccggataggcataatgcaagcgtatccactccactccgggaatatccgaaatccgctcaacaagctcgggcaacatttgcttcttatataaatctactccgtaataggtcaactcctgggctataacctggaattcctttacaccccgtgcaaccaaatacttcacctcgtcaagtatctcctccatcgggcgcgacacatgccgtcccgtaatgatgggaatagcgcaataagaacatttacggtcacacccttcggatatcttcaaataggcataatgcttgggagtggtcaatgtgcgctctatgtgcagctcgtcatgataggcctttcccaaatcctgcaacaactctctccaattgaatttaccatagaatttatccacctggggaatttcaacggccaattccttcagataacgttccgaaaggcaacccattacataaagcttctccaagtttccttcctccttggcctgcgcaaattccagaatcatattaatggattcctccttggcgtcaccgatgaaaccgcaagtattgattacggcaatctgtcccttcggtctttccgcatcatgtgtcacatggaatcccacttcctccaactgacgcatcaaatgttccgaatccaccaggtttttagaacatcctaaagtgatgatatctatagtcttccgtttcatgcattctccccgaacagtgaatcaacaaattcctttttacggaacacctgcaaatcttccattccttcacccaatccaatatatttaaccggaattttaaactggtctgaaatgccgatgactacgccacccttggctgttccgtccaactttgtaacagccattgccgtaacctccgttgccagagtgaactgcttggcttgttcgaatgcattctgtccggttgagccatccaacacaagcaacacctcattcggagcatcaggaacaaccttcttcatcacattcttgattttcgtcagttcattcatcaaaccgactttattatgaaggcgtcctgctgtatctataattaccacatcggcattattggcagttgcggaactcagtgtgtcaaaagcgacagaagccgggtcagcacccattttctgctttacaacaggtacacctacccgttcaccccatatcaccaactgctccacagcagcagcacggaaagtatcggcagcacccagataaacagactttccggctttcttgaattgataagccagtttgccaatcgtagtagtcttccctacaccattgacgcccactaccataatgacgtatggtttcttcgcaatcggtgcttcaaagtcatccacatcctccgaattattctctgtaagcaacgctgcgatttcatcacgtaaaatatgattcagctcagtggcattcatatatttgtcggctgctgcacgcttttcgatacgttcaataattttcagtgtcgtttccacgcccacatccgaagttatcaacacctcttccagattatccaatacttcatcatcaacttttgactttcctgccacggcacgcgcaatcttgccaaacacactttctttggtcttagataatcctttatctaatgtttcctttttttccttggagaaaaaactaaaaaatcccatacactaattatttttatgcaacctgttttcgcattccctgcaaagatagtgcaaaccggatgcagaataaaatgaacccgttcattttttatgccgaggtgcagcctatcttcgcattttcagcaaagatataacaaaactgacgaatattaaaaacttcgtcctctttttaaaaagaaatccccttaccggaaataccgacaaggggacctttataagtcatcagcgctttacagccactgtatttatcttatttcttaaagaagttctgaacatcttcattacggaccatctgttcatcaaaaatgtaagcaccagtcttaggagacttcaccattttgataacctttgtataagaacgtccttctttgcttccttcgtgcaaggttgctaccgctttctttgccataagttatagatttattatttaatttctttatgtactgtcactctcttcagaatcgggttgtatttcttcaactccaatctctctatggtattctttctgttcttcgtcgtaatataacgagaagtacccggcataccgctatccttgtgttctgtgcattccagaatcacctgtactctgttaccttttgctttctttgccataatcagtattctcctctactttagccaataactttaatgcttttccaatcacaataacctttagctaccgcatctttcaaagcagcgtccagtcctttcttattaataatgcgcaaaccattagcgcaaatgctaaggctgatccagcaatcctgctctacatagtagaacttcttgttaaacaagttcaaatcaaaggttctctttgttcttctctttgagtgtgaaacattgttgccaatcatggccttctttccggtaatttgacaaatctttgacatttctatcttaattttatagttttcttttttgcctatttcaaacagagcgcaaagtaagcacttttatcgttaccaaacaagtttttcttaaaataattcactgtatgatagcattttttcctcatttcagcttctcacaaagcaacaaaagggcattttgaattgctttttccacatttccctttcttccctcgtctccctcctgcttcatggtaacgatttcatttttataggcagcggctatccacaccgtacccaccggtttttccggagtcccacctccaggacctgcaataccggaagtagccactgcacaatctgttttcagcgttttcatcgcacctttcaccatttctgtaacagtttcgcgacttactgctccatgtttttccaaagtttcggcagatacatgcagcaaagacatctttatttcattggaatacgccactatactaccattaaagtattccgaactgccgggaacggaagtaatcagagcggcaatccctccacccgtacaactttctgcggtggaaagggacaatttctttgctttcagcagctctcctaccttttcttccaacttcataccttattatatattatcctaaagttacgcgtgaataagcaggtgcttccatcggacaaaaatccttatccatatacttgaagtatccggtaatggcaatcatggcagcgttatccgttgtgtagctgaacttcggaataaatattttccaaccatacttcccggcatgctcacggaaagcattacgcaatccgttattggcagaaacgcctcctgcaacagccacttcctttattttatattgtttggcagctttgcgcaacttatccatcaagatatctacaacggtagcttccagtgatgccgccaaatccgtcttgtgatgttcgatgaaatcggggtcgtccttcatccagtcgcgcagagagtaaagaaacgaggtcttaagtccgctgaaactataatccaaccctggaatatgcggtttgctgaacgagaaggctttaggattaccttgccgagccagtttgtcaataatcggaccacccggatatcccaatcccattaccttcgagcatttgtcaatggcttcaccggcggcatcatcaatggtctgccccaaaatttccatatcgttataggctttcaccaagataatctgtgagtttccaccggaaaccagcaagcagaggaaaggaaattccggctgcacattatcttcaccttctgctttaatgaaatgagctaacacatgaccagtcaaatgattaacatcaatcataggaatacctaatgaacgggcaaaccctttggcgaaagatacccccaccaacaacgaccccatcaatcccggtccacgcgtaaaggccacagcactcaattcctctttggttactccggcgcgtttcaatgcctcatgcactaccggaactatattttgttggtgcgcgcgggaagccagttcaggcactaccccgccgtatgcttcatgcacagcttggctggccaccacattcgaaagcagataaccatctttgatgacagctgcagaagtgtcatcacaagaagattctattcccaagattattgtactcataatgtttatttacgtttaaacgctgcaaaagtagtgataaaagtacgattcataacgtattatttcatatttttgttggctgattataaaaattaaccgcctatcagaaagctaaaaaaaacagtacgctgggtactcggtattgtattgggattgtatatcggtaccatattgttgctaaacattccatccgttcagcgacaaatgtctgtatttgttgccaatgaactggcttccatactggacagcaagatttccattgggcgaataaacataggattgctgaaccgcatcatcatcgacgacctgctcctggacgaccagtctggcaaggaaatgctgaaggtgacccgtctttctgccaaattcgatattctccccctattcagcggcaaaatatccatcagtaacatacaattgttcggctttaacatcaatctgaacaagcagactcccaaggataaacctaattttcagtttgtactcgacgcattcgcatccaaagatacggttcaaaagaaaaacaacctggatctccgtatcaattccttactgatacgccgcggaaaggtttcatatgatgtgctgtccgagaaagagactccgggaaagttcaatccacagcatctccgcttgcgtaacattattgcaaacatctccctaaaagcattgcaaaatgattctatcaatgctgccatcaagcgtctgagcatcgaagaagaacattccggatttgaattgaagaaactaagcctaaaggttatcggtaatgaccaacggatgaaaatcgaaaatttcgccatcgacctccccaacacctctttggcaatggatactatacacatggattatgacagtctgggggcgtttgacaatcttgcccaagatgtccgtttctcattccatttgctgccctctcaaatcgccttgcaggatttatcggcttttgttccggcttttggttcttttaaggaaaaattgcaagtagaggtacagacggacggcactgtcaatcaactgaattgcccgcacctttccgtctctgtcggaaatcatttttatctgaggggagacgtatcactacaagacctttcccatccgaaaaatgcttatatattcggcaatttgtccaatttgtacgcagacccggaaggaatagccttctttgtccggaatttcagcaagaactataatggagtacctcccgtcctgcaacacttaggaacggtttccttccgtggagaagtctcgggctacttcacagacctcgtaacttacggacaagtacgtactgacatcggaaccatccaaaccgacgtaaaactaagttctaacaaagataaaggttatttttcctattccggtgcagtgaaaaccaaagagtttgagctgggcaagatgctgggcaacaagaaactgggtaaagtaactttcaatctggatgtcaacagcagccattacgaaaaccaatacccgtccgtactgctgaaagggctggttgcctctattgattacagcgactacaattacgaaaatatcaccctagatggagaatacaagcagggaggcttcacgggaaaagtcgccttggatgacaccaatggttctgttattttgaacggtaccatcaataccgccagtcgggtaccgactttcaactttcaggcaagcatcgacaaatttcgtcctcatgccctacatctgacacccaactatgaagatacggaaatatcagtcaaagtcaaggcagacttcaccggcggttccattgacgagatgaacggtgaaatcaacattgatagcttattgttcgcagctccggaaacacaatacttcctggacaacctgaagatatccgccataagagaaagcgaaaaccagaaacggctgaccatccaatccaactttctccaaggtagcatagaaggcgattattcttatcgtaccctgcctgccagtgtactgaatatcatgcgtcgttatatccccgccttgattctgccagacaagaaacccatagagacggagaacaatttccatttcgacatgcacatttacaatacggaactgctctccaccgtctttcagattccggtaaaagtatatacccattccaccattaaaggatacttcaatgacaaggcacagcgactccgtgtagaaggctattttccccgtctccgctatgaaaacaaattcatcgaatccggaatgttcctttgcgagaatcccggtgaccagttccatacacgcctacgcttcagcaaccgcaaatcaagcggcgctgtcaatatagctttagaagcgcaagcccagaacaacagcatacagaccacgctgaactggggtaacagcagcactgtaacctacagcgggaaactcgccgccgtcgcccacttcatccgtgaacagaaagaagcgaatgaaaacaagaggaaacttccccccttaaaaaccgtcattaatgtccagcccaccaacgtgatactgaacgatacgctatgggatatacatccctcccaagtggtactcgactccggcaaagtgtatgtcaatgatttctacttcagccataaagaccggcacttgcgtatcaatggtatcgtttcaccacaacccgaagatacagtacgtctggatttgaaggaaatcaacatcggttatgtgttcgacattgcagacctcggagtcaatttcaaaggagaagccaccggtccggctttcgccagcggagtactggaaaaccccgtcatgagcaccgacttgtttatccgcaacctcggattgaacgaaggcttgctgggtgatgccaacatacacggagaatggcaccacgacgtgaagggcatctatctggatgcccatatcagggagaaagatatcgccaaaagccatgtgtatggctatgtctatcccttgaagcccaccagttcattggatctccaaattgaagcgggcggtaccaacttgaagtttatacatcattatatgagcagcatcacgcccgaattcaacggacgtgccaccggccatgtacatttctatggcaaattcaaggctctcaccatggaagggcgtgtattcggcgatgcttccatgaaggtagacgtgctcaacaccactttctccgtcaaagacagcatctacatcgagcccggcgggttgaccttccgcaacaaccgcattttcgacacgcaagggcatcaaggcagcatgagcggctatctgcactatcagcatttcaagaacctggagtaccgtttcaatttcaatgtcaacgacatgctggtgatgaataccaaagaatcaccggactatcccttctacggcaccgtctacggtacgggaaatgccactattgccggtaatgcccaagatggcgttaacattgacattgcaatgactaccaatcgcaacaccacctttacctatataaaggataacgtatctacagcagtcagcaaccagttcatcaagtttgtggacaaaacgccacgccgtgccgtacaagactctgtccgcctttccgactacgagattgcccaaaaggaaatcgaggaagagaaagagagcgacactgacatccggttgaatctcttggtagacgccactcccgacgctaccatgaagattatcatggaccctatcgccggcgactatatcagtggacggggaaccggaaatatccgtactgagtttttcaataaaggagatgtaaagatgttcggcagttaccggataagccagggagtctataaattcagtctgcaagaggttatccgaaaggactttattatcagggatgggagtaccattacattcaacggttcgccgctggatgccactctggacataaaagcaggctatacggtcaactcagcatccttaaatgacctgatgcccaacgaggcaacctccggctacatcagccagacaaatgtaaaagtgaactgtatgatggaccttaccggacaattgacttcacccgatgtaaaatttgacatcgagctacccaacgaacgcgatgaagtgcaggccattgtccgtaactatattcctactgacgagcaaatgaacatgcagatactctatctgttggctatcggcaagttctataccccggaaaacttgggagccacccagaattcgaatatgatgtccagtgttgtttcatccaccctttccggacagttgaataacgctttatcgaacattctcgatgttaataactggaacttcggcaccaatttcagtaccggtgaaagaggctggacagacatggagttcgagaccatgctttcggggcaattattgaataaccgactacttatcaatggtaattttggttatcgtgacaatccgatggcaaatactaattttgtgggagactttgaagcggaatggctcgtcaaccgttccggagacatccgcctgaaagcgtacaacgaaacgaacgaccgctactacacccggacaaatctgacaacacaaggtattggtattatcttcaaaaaggatttcaacaaatggagtgagctccttttctggaacagatggaaactcaaccggctgagaaaggaacaagaaataaaacaagataccctatcctctgataaaataaacacagaacagcagatgcccgaggcacaatcaaaacggaaaagggagcaaaaataagattgacgttcttactgtccacattgaaggttttagaataagtaaataggctcaaatacagtattttaacatggctacaccctttatacctaaaggtgtagccatcactctacgatggtataggcattcaaggcaaagggtgtagccataaaaatacatcagaaaggtaatggcccgtccgaccccacacctccaaacgggttgtccgtctgtggcggaaaatcagcagccgatggaggtggcggtgttgccgtacttccgataggcgcattcatacgtgaaccgaatgtagctcctccaccctccgtcggaggtggaataaccatatcatcctcgggattctggaaacgggtgtactgtccgataaacctcagacgcacatcccccacggcaccgttacggtgctttgctatgatgatttccgccataccgcgcaagtcactgccatcggcagaagtataaatcttgtaatattcgggacggtggatgaagcaaaccatatcggcatcctgctcgatggcaccggattcacgaaggtcactcaactggggacgcttgccttcctcgccttcacggttctccacaccacggttcaactgcgacagagcgatgataggaatgttcagctccttggccaaacctttcaatgaacgcgaaatggtactaacttcttcctgacggctaccgaaagacattccgcttgcattcatcagctgaaggtagtcgatgatgataatctttactccgtgctcacgtaccagacgccgtgccttcgtacggagttcgaataccgacaaagaaggcgtatcgtccacataaagcggagcatccagcaagtcacgcagtttgtaatccaactgttgccattcataatctgccaactgaccactcttgattttctcactcggaatctcgcacacattggaaatcagacggttcaccagctgcacgttactcatttcaagcgagaacagcgctacgggattacggaaattcacggcaatgttcttcgccatggaaagcacgaatgccgttttacccatggcaggacgggctgcaataatgatgaggtcagacttctgccatccggaagtcatcttgtccagcttggtataaccactttccaaaccactcaaaccatcggtacgggcagcagctttctgaatcaaatcataggcttcggcaatgacaggattaatctgcgtataatccttcttcatgttctgctgggaaatctcgaacagctttccttcggcctcctgcatcaaatcgtccacgtccagcgtctcgtcgaaagccttgctctggatattgctggtaaaagttatcagttcacgtgctaatgctttctgtgcaatgatacgggcatgatattcgatgtgcgcagaagatgccaccttactgctgagttgggtaatatagaacggtccgcccacttcctccagttctccccgcttggaaagctgctccttcacggtgaggatgtcgaccggcttctgatttacagccaaatcggtaatagcggaatatatcaactgatgcctatgctcatagaatgactccggacgaagaatttcacttaccagcgaataagcgtccttctcaatcatcaaggctcccaagactgcttcttccagctccggcgcttgcggctggatacgtccgtagtctgttacgggctgtggtgcctttcctttcggagtacgggatgttcttctttgttctgccactttaagaattaaaaattgaaaattaaaaattaaatgaacttcccttttagaaaggggaagcaaagataagcgaatttatttataagcggtaaataaatcattgctaagttttcaatctactatgaacagaaatcactaactttgtcttcggaagctgcactccaatagcttctccttttaattttaaattattaattcttaattttcaacgccatgctgacttttccaaatgccaaaataaacctgggactgaatatcacagagaagcgtccggacggataccataatctggaaaccattttctatccggttcccatagaagatgctttggaaataaatatcttgaacgaaggaaaaggaaagttccgtctgcatcaagcaggcctggagattgagggagaagcggaaaacaatctggtagtgaaagcctacaagttgctggacgaccggttcaaccttcctccggtagacatccatctcttcaagcatatcccctcgggagccggactgggtggcggttcggccgatgcagccttcatgctgaagcttctgaataataagtttgaactcggactgccggatgacactttggaaacgtatgccgccaagctgggggccgattgtgccttcttcatcagaaaccgtccgacttacgcagaaggtatcggaaatatcttttctccccttcccctctcactgaaaggataccggatatggttggtgaagccggacattttcgtctctacacgggatgcctttgcaaaaataaaaccgcatcatccggaaatgtctctgaaagaaatagcccaacttcccgttgaagaatggaacggacgaatggtcaatgactttgaagaaagcgtattcccccaatttcccactatcggagaaatcaaggaagagatgtatcggcaaggagctgtatatgcctccatgagtggttcggggtcatctgtttacggattattcaaggaaggtgccgtactgccggaagtggatttcggagaaaaagcttttgtatacaaaggccggttcactgatatttaaaagtacatcgacacaacgtactgattcccggaaacaaaaacacaacaaggttgttcttacagaaaactcaaaacaaccttgattatgaaaaaattaaaattcggtattctggcaggactacttatcttgttgtcagtgtccgcctttgcggaagggcgtcttcctgcaaatatacaaacagcttttctaaagctctatcctcaagcaacggatgtggaatgggagcaaatggccggttgctacgtggcagaatttattgcagacggtcaggaaattgatgtctggttcaataaacaagcggagtgggttatgactgaaacggatgtagagtcactggaaaaagtgccggctcccgtggcagaagcattcatgagcagtacaatgaccggcatgagattaagggatataagaatcatcacctttcccaaacatcccacagtgataataattgaggtggaacaatacaattccgatgaagaattccaactgttctatgctccggatggaaaactattacaaagcctcgatgtaacagaacttggaggagagatttatcccggactctttttcaatgattaatactgacgattggtgatttgttgatggtatccattcatcaacaaatcaccaatcattcatcactaatcattaatatacctctaccctatcagcaatacgcttcgctttgtcgcgcagcgtgtcaagatcactgtcaagaggtgcataacacagcactacacccatacggcggtttacgcgggtagtaggcttaccaaaaatacgcagataagtatcctcttctttcgtaacctcttccatgccacgataattgggacgttcctgactggctatcggagaaaggatgacagcactggctcctatacgctcctgcttgatgccagggataggcagaccaagcaccgcacgacagtgcaattcaaactcattcagattctgggttccggccagggttaccatacccgtatcgtgcggacgtggagagagttcggagaaatagacaccgttctcatggctgagaaagaattccactccccacaatccggcaccggtcaaggcacgggtcactttctctgccatatcctgcgcctcccttagatgggcagggtcaatatgggcaggctggaagctttcacgatagtccccacccttctgtacatggccgataggcgggcagaacaaggtcggaccattcttctgtgttacggtgagcagtgttatctcactgtcgaacttgatgaactcttcaatgataagttctttgatgtctccacggctaccattacagccatactcccaggcatgctccagttcgtcggcactctttacgagagactggcctttaccggaagaggacatcagcggtttcaccacacacgggaaacctatcttttcagcagcagctttcagttcatccaaagatttggcataaaaatatttagcagtcttcaatcccagctctttagctgcaaggtcacgtatggctttacggttcatggtaaagttcacggcgcgtgcactgggcactacctgaatgccttctttctcgaaatcatacagacgttctgtacggatagcctcaatttccggaacaataatatccggctggtgtttgcgtactacacgttccaaagcatctccatcgagcatgctgaatacctcacattcatctgccacttgcatggcaggcgctccggcatacgagtcgcaagcaatgatatactggcccttacgttgggcggaaataacaaactccttgcccaactcaccggaacctaacaataaaatctttttcatcaattcttttatttacaattttatatatttacgatttgacgacgtacgatgtacgattagaattactttagacaataaaccgccacaagccaaagcaatcccaatcgtacatcgtaaatcgtctaatagtaaatcctcttattggtgttgttctctcaacaagtcattcaccgtctttaccggattgaatgtagtcagaggcacttctacaaatactgtgttccaatcactcatggccccgttccacaaaccgggaagttcaagcgccttcaggtccttgccgttcttggacttataagagatgaagcctgtcgctttatccacatacttcacaagattgaacttatgtcctttatagtcacgtacggcgcaaaccaaatccaccggattgaaatgggtacctttttcaaacatttccttcttttccgggtcgtccatatcaatctgcgaactttccagaatctgcagagagatagtaccgtcactgttgtatgccaagaacggacctccgcccggttcgcctacgttcttcaccataccgcaaacacgcatcggacggttcagcttctctttcagatatataaccaactcggcatcttccagattctttgtctccggattcttgcaatagagttgtttctgcaggaattgcagaacttcaagaatttgctcgtgtgtatacttcccgctgtcaagcaactgcagataagcaaacgctctctgctgtaacgctaccagcacaccggcaatcagtttcttatataatacggtgtcacctttcagcttgtcgggtaccacattgtctatattctttatgaagataatatccgcatcaaggtcattcaagttttcaatcaaggcgccatgaccgccgggacggaacaacaatttgccattgtcgcggaagggtttgttttccatatcggcggcaatggtatcggtgctcggcttctgttccgaaaaagagatgttataatccaccccatacttcttagcataagcggcagccttttcgtctaccaaagccttgaacaaggcacgatgttcgggcgaaaccgtgaaatgcacattcaccttaccgttcttattggcagcatacaatgctccttctaccaagtgctcttccagcggcgtgcggctaccgtcttcatacttatggaacttaagcaatcctttgggcagagcaccatagttcagtccggccccttcgagtaaggcagcaacaaccgccttgtagtttccagcggcaaccaaagtcggtatatcctttccggcagtcctctggcaagcggtattcaagtcatcatagaaggcaaacttctctattttctcaaagaaagtcttttcaaagtttgtctggggagtgtcatagtctgccccgagaaattcaaacaagttcttgaacatacggctggcagcacccgaagcaggcacaaacttcaccaccactttatcggtttgtgtatatgcctcccaggcatccaggtatttcttctgttcatccgtatccggagccattatacccttttctacagaagcggcggcagacagcttcaagtatggaaaacctttttcgaaacaagccaactgttcggctatttgttcttcggagatgcctttattttcgagcaactctttgtcttgcggtgttatcataatatcttgttttattaattcatgcccaaaaatacaaaaaaagcagaactgccgtcaagaaaatgaagaaaaaacttacctttgaagcataaaatacggacgattatggaaactgatgaatttttcactatcaaagagaaagatttactcttctcgctctaccgcaaactgttgcaactttccggagaaaccctccagaagggggactgcaaaaagctgaaaacacatcttgtcaatactatacagaacaaccgtatccagcgtgatatattcggtttgaatcccgtcatcaaagatatgcagacggctgtcattgtagcggaagaaatcggaatgaagcgtgcttctatcctggggctcatgctgcacgactccgtgcgctgcggcacttgcaccgctctggaagtggagcaaatctatggcgaggatgtggcaggcatcatccggggattgatacgtgtaaacgaactttattccaaaagccctaccatcgagtccgagaatttccgcaacttgttgctgactttcgccgaagacatgcgtgtcattctcatcatgattgccgaccgcgtaaacatcatgcggcagataaaggattgcaagaacgatgaagcccgtcggcaggtagccaacgaagcggcttatctctatgcgccccttgcccataagctgggtctgtacaaattgaagtcggaactggaagacctctcattgaaatatacagaaaaggaagtttactaccatatcaaggaaaaactgaatgagaccaaggcatcgcgtgacaagtacattgccgccttcattgcaccggtacagaagaagctcgaagaagccggactgaagttccatatcaaaggacgcaccaagtccatccactccatctaccagaaaatgaagaagcagaaatgccccttcgaaggcgtgtatgacctgttcgccatccgcgtcatcctggactcttgcctggaaaaggagaaactggaatgttggcaggcctactccatcgtaacagatatgtaccagcctaacccgaaaaggctacgcgactggctgtccgtacctaaaagcaacggatatgaatcactgcacatcaccgtgatgggccccgaaggcaaatgggtggaagtacaaatacgtaccgaacgcatggatgatattgccgaacgaggcctggccgcccattggcgatacaaaggagtgaaaggtgaatctggtcttgacgaatggctgacttccgtacgcgaagccttagagagctcggacagcaacggactggaaacgatggaccagttcaaactggatttgtacgaagacgaggtatttgtatttacccccaaaggtgatttgttcaaacttgccaaaggctccaccgtgctcgattttgcgttccacatccatagcaaactgggctgcaaatgtatcggtgcaaaagtgaacggcaagaatgtacagctgaagcaaatgctgcatagcggtgaccaggtggagataatgacatcgaatacgcagacgcccaagcaggactggctgaacatcgtaaccacctccaaggcacgcaccaaaatacgccaggcattgaaggaaatggctgcacgccagcacgccttcgctaaggaaaccctggaacgcaagttcaagaaccggaagatagagtatgatgaaggaaccatgatgcgcctcatcaagcgcctcggtttcaagatagtgaccgacttctatcaagccatagccgatgaagaactggatgtcaacgagattatagacaaataccaggaacagcaaagacgggaaaatgatacgcgcgacgatattgtctaccgcagtgctgaaggctataaccttcaacaaggcataccggaagagataggtaccaaagaagatgtactggtcattgatcaaaatctgaaaggattggatttcaagttggcacgctgctgcaatcccatctatggagatgatgtattcggctttgtcagtgtgacgggaggtatcaagatacaccgttgcgattgtcccaatgccagtgatttgcactcacgtttcggctaccgtatcgtgaaggcacgctgggccggaaagtcacaaggtacacagtaccccatcaccctgcgcgtagtgggacacgatgacatcggcatcgtgaccaacatcacttccatcatttccaaagaaacgggtattactttgagaagcatcggcattgactcgcatgacgggctgttctccggaacactgaccatcatggtgagcgatacgggacatctggaagcacttgtcaagaaactgagaacagtaaagggagtgaaacaggtttcaaggaattaagcaacaactataatccatgaagtacgactttaaaaagcagttgcgcagtttcggatatgcttggaaaggtatccggtgttgcataggaaaagaacagaacctgagcttccatctgatagctacggctgtggtagtcattgcaggattcgttttaggcattacccgcatggagtggatgataatcattctctgcatcggagtggtgatagcagccgaactgttcaataccgccattgagaagctggtcgacctggtgtctccccaacagcatcccgtggcagggcaagtaaaagacatagccgccggagcagtactggtatgtgctgcaacggcggccattataggattgattgtatttatcccttacctcacccgcttcttcttataataaggataggtcagcagtacaaagaaaaatacggcaagcatagcagcaacagacgccacatggtatatctgcgctttgtccatcaggtggcaagccacagtcatgcccaccagcagccctgcctccatagacaaatgacaagtggtgtttgccgttccacgctggcaatggtgcgacagcttgacgaacatcttcatgaacgggactgtaatgaacaccaatacagccaatgccgccaatgaccagtaatcgcccacaaacatcagtggcagcaacgctcccgatacaaaagcaatcaacagcatattgatggcaggtacccatgcacgcggcaataagaagcggtccatattgcacaacgacacgcctatcggagcacggaaagccacatataccctcgatgcgaaaaatatgctagccagtccggccgctacggacagataggtcaccatacggaaaccatacatcttatacattccaatgcccaacacaacacccaccagcatgcccaagcgtgcagcccatgcatataccatgtttcctgcgctgcggcgcgcggaagtcgttatgtcgatggccaccgtaatgcccgctgtggttgccagcccgaaacatgctccctgcacagcggcaagcagcagaaatttcgtataaccatccacaaaggcatatcccagaacagccgccagcataatgagtgcggagtaaaggagcacgtgtttccttttatattcatcgaccagataggcatggaaaggaccgacagcaaacatggccaccacaaagaccagaaacatgctgcccgcctgcccgacggaaacacccaactgctctcccatcacaaaaggaagcaaagggaaaagcatatagacggatatgaacagcaacagatttgccgtacacatccgccaaaaattgagtgtcatgagtttgttagtactgttctttctcattcgggaaatctaaattcttcacatcggatacataacggctgatggcatccgtcatcactgtatgcaggtcggcatagcgacgcaggaaacggggacgaaaaccgttattcatacccagcatatcctgaaccaccaacacctggccgtccacatcgccaccggcaccgatgcctataacgggtatagtcagctcgcttgccacgcgggcagccaatgcggcaggaatcttctccaataccagtccgaagcatccggcttcttccagcaaatgcgcatcgcgtaccagtttctcggcttcggcatcatccttggcacggaccgtatatgttccatacttgttgatggattggggcatcagtccgagatgtcccatgatgggaataccggcgctgaggatacgcttcaccgtaccgatgatttcctcgcctccctccagtttgagggcgtcggcatggctttctttcataatacggatagcggaagccaatccctccagttcgttgccctgataagagccgaaaggcatgtcgacaatgaccatggcacgcttcacaccgcgaaccacggatttgccatgataaatcatctggtcgagcgtgatgggaagcgtggtgacattgcctgccattacattggaagcggaatctcccaccagaatcacgtctaccccggcaccgtccacaatctgcgccatagtatagtcatatgatgtcaacattgatatcttttcgcctctctgcttcatttcgataaggcgatgtgtagtcactttacgagtgtcgtctgaaatataacccatgatagtatttacaatttggcaatttacaattactcaatttaattttcggcgcaaaggtaatcctttttctgattacttgtacaattgagttaatttatcgtaagtgaatccctgaaagtcatccaatacataatgacacaacggagctatgtcttcacgggaattggtggttgccaaccctataacggtagctcctgaagccatgccggctttcagcccgttgaaagaatcctcgaatacatatgtggtgtcgggagttgtgccgaaaacctccatacccaacagaaaacaatccggtgcaggcttggaagccgtaaacatctcggccgtaaggatacggtcgaaaagagtctttatttcgggatgaacccgatagacagctgccatcttcgcttcgttggagctggtcactacggcagtcttcaccccattccggtgtaggtcggcaatgaagtcaagcactccgggaataaagtcgaatgacatttcctgttcaaagcggttcagccgttcggtaatttcggcctgttccttcgccatgcccggaaaaaaggtatcataaatatagaccagcgtctggcccttcaccctgccttcaatatcatccatacccaaatactgctttcccatttcatgccagaagtgactgtactgtgtttccgtgtctaccaccacgccgtcaaaatcaaaaagtacggcggttgcttttgttgtgtccataaactttcttttacctaaatctgttaataccaaaacattatagcgtacaaaggtgggaataatctgcgaatcaaacaaatattttatacctttgtgctccttaattgactcatatcaaatgaacaacgcgcatatattaggaaccgaacgtattggcaaactgcttgtgcagtactccattccggccattataggcatgacgattacttcgttgtacaacatcatcgacagcattttcatcggtcatggcgtaggtcctatgggcattgccggactcgccattactttccctctgatgaatctggtcgtggctttctgtacgatggtatcggcaggtggctccaccatttcgtccatccggttgggacagaaagacctggacggagcaacggaagtattgggaaacacactgatgttctgcctggtcaacgcattcatattcggcagtgtttcattcatctttctggatgacatcctgcgcttcttcggtgccagcaatgatacgttgccatatgcccgcgactttatgcaggtgatattactgggtacccccgtcacttataccatgattggcctaaacaatatcatgcgtgccacgggatatcccaagaaagcgatgctcacgtctatggtaacggtagtctgcaacataatcctcgctcccattttcatcttccaatttgactggggaatacggggagctgcaacggcaacggtcatctcgcagttcatcggcatggtgtgggtagtgagccatttcctgcaaaagacaagtgtggtacgtctgcaacgggggttctggaagatgaagaaacgtatcatcagtagtatattatccatcggtatgtcaccgtttctgatgaacgtcacggcatgtgtcattgtgattatcgtaaacaacagcctccaacagtacggaggcgatatggccatcggggcatatggcattatcaaccgactgctggtactctatgtaatgattgtattggggctgacgatgggaatgcaaccgattgtaggctataacttcggtgcgcaaaagcacgaccgtgtgaaggctaccctgcgcctgaccatcattgccggagtatgtatcaccagtacaggcttccttatctgcgaattgttcccccatgccatatctgccatctttaccagtgatgaagagttgatagatattgcttccagaggcgtacgcattgccgtagccatattcccgttggtaggtgcacagattgtcatcggcaatttcttccaaagcatcgggaaggcgaaaatcagtatcttcttgtcgctgacacgccaattactgtatctgttgccgggactactgatattcccgcattactttgggctggacggcatctggatatgtatgccggtatcggacttctttgcttttgtgacggcagcggtggcattgtggatatatgtaaagagattacccacaggaattaccgaaaaagcgaggtgaaagtgatttattctactgcaaatattgcattttatgttataacaaacaaattgttcgaaaatatatcattcattcagcccaaacacatcatctattcgccccaaacagatggtctgtctaccccaaacgcatgatgtatgttgcggcaactttattcgctcttgatgctctttaccggattttcattggcaatgcaccatgccttcaacaccacggtagcaacgataaacaacagcaacagacaacctacaagaatatatccgcctatagggaatggcacaacatcagagaactggctcgcccaaagctttccggcccggcatgctcccccaatacctatggcgacagacggaatggccagccaaagcacatctcttgacaataacagcaaaatactttccgtctccgctccattcactttacgaatggcaatctcttttgaacgcaggtggatttcatcattcacatagcctatcagtcccatcagaatgataaagagtatggtcaatgaaaccagcagggtgacatcacgaaatacccgtacagactcggcataactgcgcatttcctgctccaccgaacggaatacgaggcttttctgaggataaatccgatgcatctcttcattgaggcgggcgagattttcatccaatggctctttgaggcgaacatgcagggtggcagctgtcttccccgtccattccaccatcaccggcaaattatcgttgggcatatcggcaaaactgaaactgtctaacagcccgacaacagtgccataatcattcacccgcttgcctatggggttgtctgtccaattcatcttctcacaaaagacactgttgacaagcaactgaccttctcccgtcaagttatgcccctctttcagtctcagaccaatgaaaggaagaaaatcactgtcgaaccaagtattacgaggatagaaaagctcgttaccctgattgtcaagaattggctggttagaaccgaaccacaatatagggcgttctgccgaagcaaccccttccacataaggcaaactgccgacaagactacgcaggctattgccatccacttcccgctgggtggtatatgccacacgttcaggacgccaaccacggtcacgcgtcgttacataactgtactgtgaaacgaccatcagcatcatccccagaatgaatgccgctccgatgaactgaacaaaaagcagtacccgtttccagccacgacgcccggaagtgtagcggcggaacacttgtgtcaccggaatacgagcgaaaagcatggcaggcaggcaaccacctaaaataaacagtaacagtatcaccgacaatggtgcccaaagattctgccagtcaaaaagagcactgagaggtacagctgccaattcttccattttttcgtggaaaatatacaccagcagtccaatgagcagcaaggcaagccctactactatagcagtctctaccatgaacatggaaaagatgctacttcccgaagcaccgctgcatttgtgtacaccgatggccttggcacgctgtgtcagcgaagccacggaaacgagtacataattcaatgcggtcgtaaaaagcagcacgatacccaggaagaacataatccaaatcatcttccgtacttgaggagtctcgacatgcagattatggatagggacaatacgtacgctcaattctaaaccactttccggtggaatatgacgggcaatagctatggacatacgctcattcagccaatcagcatcctgcgggctgcgcagcctgagataaccgtcgtagtttccgccgctttgccaacctaggttccacttcagatgccgccctatagtaggaaaggaaatgattgcctctggacgcctctccaaagaagtgttcaacggaatatcggcaaagatacccttcacgagcagtgtagtctgatatccccaaaaatcataacgcagtgttttccctatcggattttcgtcaccgaaggcctcctttgctgacttggcagaaaggaatacgacatccggacccgccaaatcctgtggattgccttctatcatctccaaaccgagtacagaaaaataaagtgtatctgccatcaccgtggacatatctaattggcgctcacccaactggaaactattatcaaaaagagaacagctcactgtgctactttccacttgttccggaaactcttcggcaatggcagccggaatcggaatgatggtaaagcgactttcgttaccttccaacactccatttttcaaccaacccgtcttcacaatataaaggttatccgaatcatgataaaagttatcaaaactcaactcgaatgcaatccgtgcaaatagaaatacagacatcagcagtcccaatgccaaagatacaatcttaatggcattggaaccttgcttgtgcaacaagctttgtaatgtataataaatgtgccgcctcataatttcctgaagttattctttattcactcttgatactgtctaccggattctcattggcaatccgccatgccttgaatactacacaaccgatgatgagcaatagtacaatgcatgcaataagcaagaatccgcagataccaaaatccactccctccacaaactgctctatccagacaccgcctatataccaggctcccagccctccaagaaaaacggccggcaaggatatccagaatatatccttcgagaaaagccggagaatggatgacgcttccgcaccattcactttacggatggcaatttccttgctgcggcgttgtatctcgtcattgatgtagccaatcaaccccattaacgtaacaaaaaggatggttatggcagccagtaaagctgcattacggaaatccgtgacggtactgttctggtcgtcaatgaccttttggaacgaggaaaatacaatgtcacgggtgggaaacagcttttccatgtcttcgttcaaacgcttgaggttatcgtcaaaaggctctttcagacgtaattggatgtttccggaaaatcggtcaagataagttgcatacataggttgcaccgccacataagcggcattggatgtagcaaagtctttcagtacacctacaatattgcccgctatgcgatcgccgttgcgcacttgcctgcctatcggtttatcttcccaatgcatcattttcaaaaatgtttcattgaccaatatctgcccaggggcatccatattcttgccttccgcaaattccaacttcataaacggggcatagtccttgccaaattccacccaacgcatgctcatccactgcccgttatcagtcgtaaccccttctccgctcaatccgtctgtaagaagattaccgctacaagctccatcttccacataaggcaaagaaagcatcacactacgattggcatcgctttccgcatccgagtcaaaggatacgcccgaagcataggccacccggtggtaatcgaatccacgttctttattggtgatgtaatggctctgcataagcaccagccccaacaaaccgaaaataaaggaggtaccggcaaactgcacaaacaagagcggacgtttccagcctttcttgccttcggtgtaccggcggaaaacctgcgtcaccggaatgcgggcaaaaagctgcccgggcaacatgccgcctatcataaacaaaatgactatcactgaaagcggtgcccaaatgttttcccaagagaaaagaccggcaagactaacgtcaagcatgtcctccaacggctcacggaaattaaatagaagcagcgctacaagcagcaaggaagaaagcatgatgactccggtctcccataagaacataccgaaaatagttcccgtatttgccccactacatttatgtacgcctatagctttggcacgacggttcatggctgagatggaaataagcacataattcatcgccacaataaaaagtatggcggttcccagcgtcaacagaatccataccatacgcatggtactgataccaaattccatacggtagtcctttatcggaaccagactgataaacacatcatcgctcttgcgcacctgctcggcaagtttctctattcgggtgttcacatcgtccaattgcacccccgggcgcagacggacaaaggacatatagctgtctccacctccccacccccagtatccccaatgatgcttgaaggaggtagccagagacatcacgacaccacttccatagaaactggagttttcgggaaaatcttcaaaaatgcccttcacggtcattggcatctgtttgttatagaccaccgtctgtccgatgggattcttatcggcaaacatgctgccggccagctccctgctgatgaagaccacctccggattattcagctcgcgagggtctccactgacaacatcaatgcccatagtggcaaagaaacaagaatcggccgtcatggcattggtctggaaacggcgttcattggcaaaccaagccgaattgctccaccattgctgggtgacggtaacactctccacctcgtcaggcaggttttcggcaatagtaccagccaccggtccaagagttatatgcgaaggatgatactcgttgttgtaataccatactgttttgacaagacacaaacgttcatggtccttgtagcaggtatcataattgagctcgaatgcctgacgggaaaaaatgaggatactgactgccaaccccagtcccagagaaacaatcttgatgaggttggagccttttcctcgtatcaatgtctggagagtgtaatatagttgtctcatggaagttgttttaaaagtccgttacaaatcctgcgctgccacacttgccaccacactaccgtcgaaaagatgtatcgtgcggtgtgcaaacgaggcgtcgtgctggctgtgggtcaccataataatcgtagtaccctctttattcagctctgtcaacagattcatcacctcagctccgttcttggagtccaagttaccggtaggctcatcggcgagtatcagcttgggattggttacgaccgcacgggctatcgccacacgttgctgctgaccgccggaaagctgttgcgggaagtgtttggcacggtggctgatgttcattcttttcagtatatcctctaccatacgcttacgttcacccgcctttacgccaagatacgtaaggggaagttccacattctcgtagacgttcagttcgtctatcaggttgaagctctggaacacgaatcccagtttccccttacgtacgcgtgtacgttccttttctttcaagtccgccacttcctggccgagtagcttgtaactgccctcagtaggattgtccagcagtcccagaatattcagcaaggtggatttgccgcaaccggacggccccataatggctacaaactctccctcctttacatcgaggtttacgtgattcaatgctaccgtctctacttccgaagtacggaatactttgctgatgttgttaatctcaatcatgatatttaatgttttaatattgttttattcgctcttaatactattcaccggattctcgttcgctatccgccaggacttccaaagtacgcaggctacgataatcaccaaattggccatcactaccagtacgtatactgcccaactgatgtgaatacgctccgcaaactgttccatccacattccgttgacataccatgctaccaccgtaccgatgacaactgccggagccgccaccacaagtacatccctcgacagcatttccaagatgccggaagcctctgccccgttcactttacggatggcaatctccttactgcggcggcgtacctcgtcggtggtatacccaatcagtcccatcagcatgatgaagaacatggtcactgccgccatcaaagtggcattacggaatacacggacagaattataactattctctattcttttctcatagccggtaaagtcaatggtctggtcatggaaagcctcggctacatcgtggttcaacttctgcagattttcggtaaagggttctttcaaacgaacatgtaccgttccataaaaattcttgttcccacgggctatgaaaggcatcttctcggttctgaaactctctatctggaaatccttcaactgccctacgaccttgaatgtattcccttcggtatataccgtacggcctacgacgtcgtctccccaacgcatcatctcggcaaaggtctcgttcaccacgacttcctctttatcgcgcgccatacgtcccgtcttcatagtcatgcccatcaaagcaggaaaatcctcgcgcatgaaataagaagaacggcaagagaaaagtgcctgcccgctctcactatgaatcatcgaaccgctatatccgctaatgggtgtgctgttggcgctggacaccgcttccacgtagggcaatcccttgaagaactgataagccgcgtcacgcgtcgcttcattatcccagtaggcattacctatggctatctgcttgggattataccccatatcctttttcagtacatactgatattgcgacatcaccacacacatcaatccactgatgaatgccacgcctgcaaactgcacaaacagcaacggacgcttccagccctttttcccctcggtatagcggcggaacacctgcgatacgggaatacgcgcaaagagccggcccggcaacacgcctcccactataaacagcagaagcactaccgacaacggtacccagatacgctccggagccaacaaggtggagagctttacaacgaccgtgtcttccacaaaatcgcggaagttgagcattatcaacgccatcagcagcaatgctgccgcaatgatgatacctgtttccagcaaaaacatgctgaaaaccgtgccaccgctcgcaccgctgcatttatgtacgcctaccgacttggcgcggtagctcaaagaggaaatggaaatcagcacatagttcaacgccgcaatgaaaagaatggcaaaaccaagaatgctcataatgacacgcatccgctgcacatcatcataattgcggtatgtatcacggatgggctgcacaaaagccgtgtaaccgtactctttcttatcttctgccgggcgatatttgtctatcatggcatcaatacgcgcattgacaacagatttgtcggcaccgggacgaaaacggataaactctacccaactgtctcccccgctccacgagtagttattccagttgcggctccacaaggtaggcatcgagataaccgcttccggattgattgtggcgttctcaggcaaattggcatagattcccttcaccgtcaggtcaaactgatggtcataattaagcgttttccctatgggattctcctcaccgaacactttccttgcaaagcgttcactcaagaaaataatatccttctgcaccaagtccttttcgggattcccgttcaggacgtcgatgcccatagtacgaaagaacagcgaatcggctgcaatcttcctgtcatcaagacgcacgcttccattgtaaagaggagcagataccatagacgtgctcaaacttactgccgactccacctctttggggaaattctccaaaatagctcctgccacgggaccgcaattccactcctgaggctcaaacttctctcctttcaccgagaatatcgaccatacctgatacaagttatcataatccttgaagcaagtgtcaaaactctgttcatatgccacgcgggagaaaagcagaatactcatcgtcaatcccaatcccaaagaaatgaccttgatgatattcgaaccacgtccccgcagcaaagtctgaattacataatagatttgtttcattccgtttatcgtttattagatatattttcttgctttctatattgcagaaagcgtgccaaagaatgcacaaacctgattatcagcatacatctcataattaaagaagaaaaaagtgtctaatttttagacactcccgtctaaaaattagacagaggccgaatctctgttcagcctcatagaacaaaaaaaagggaaattagaaaagaatccataagaatgaaaactttacctttgcccacagttttctaaagatagagtataaacgtaaaatgaagcacctgcacatgaaattccccaaactcttatatccttcattcctatgcctgcttatagccggctgcgacatgatagattatcacccttacgatgtacacatcagcggtgaaaccgatgtcaatgcccacaacattgcccaaatagagcagaactgccagaacaagacaacaatccggttcgtaacaatgggtgattcccagcgctggtatgacgagaccgacgactttgtaagccacctcaacaagcgggacgacatagatttcgtcattcatggcggagacgtcagtgacttcggtgtaacagacgagttcctttggcaacgggacattatgaacaaactcaagataccctatgtggtacttctcggcaatcacgactgcctgggcacgggcgaagagacttatcgtgcaatattcggagaccccaatttctccttcattgcaggacgggtaaagtttgtctgcctgaataccaacgccatcgaattcgactactcccgccccattcccgacttcgagtttcttgccgcacagatacgcgaccatgaagaggaattcgataaaaccgttgtgtccatgcatatacgcccgttctgcaacgagttcaacaataatgtggcacacgtattccagcgttacatcaaggaatttcccggactgcagttctgtacatccgcacacgaacaccatcgcttcgagaaagacctctttgaagatgggataatgtattacatgagcgactgcatgaagaaccgcaattactatatattcaccataacccccgacggatatgaacgcgaagtggcatattattaatcacctggcatgcgccgtcgtcttcttgtcggtatgctctttttctgctttttcacaagagagagataccatcttcatcatagaacacgataccgtatggatggacctgcaaccggatgccgtcattgaaagccagaccagagagaaccgttatgaccgccgcgtacaccgctaccgcaggcattgggaggccttgattccgacgcacaccaaaattcagtttgccggcaatatggggttgctgtcattcggtaccggatgggattacggcagaagaaaccaatgggaaacagacgtattcttcggagtattgcccaaatatgactccaaacgtaccaagctgacattcaccgtcaagcagaactaccttccctggagcctgcaaatcaagcagagccgtttttctgtagaaccgctggcttgcggcatgtatctgaacacggtattcggcgatgaattctgggtcaatgaaccggaacgctaccctaaaggatattatggtttctcctctaaggtacgcatccatgcattcttaggacagcgcatcacttacgacatcgacccgcaacgacggttcacggccaaagaaatcactttcttctatgaaataagtacatgtgacctatatgtagtcagcgccttcaccaacaagtatctgaaacccaaggattatctgagcttgtcatttggcatcaaactgcaactgctataaattttttcagtaccgccatgagctcttactgaagttgctacaaactaatttctgttttacttaaatctattcgtcccacaatcgttatattatcgtccgacagctgttgaattatcgtccaacagttatcggacgataattcaacagctgtcggacgattaattcttagcaagcaaaaatataaaataaagcggcataaggatttgctaaatgagaaggagaatcttaatactttgaaaactgagagatttaccgaatataatgcagataaatcattaactttgcctgcagaaaacagaaatagtttatggcaaaaaaaaatggaaacatcctgattgtcgatgataaccgaggcgtacttaccgccttgcagcttttgttgaagccatattttgaagggataatcacacttccctctcccgtaaccctgcccagcgtattgcgggaaaggtcatggcaagtggttcttcttgacatgaacttcacctcgggcatcaacaccggcaacgagggactatactggctccataaaataaagaagcaatgtcccaccctgcccgtagtgctgtttaccgcctatgccgacattgaccttgccgtacggggaatcaaggaaggagccacagacttcgtcgtgaaaccctggaacaaccagaaactggtggaaaccttactgaatgccgtatcagcttctgaaacaaaatctccggccaacggcccaaatgccggacgtacggcagaaagcagccacctgtttgcagatacccgcaacatgtattggggaaacagccccgccatgcagcagctccgccttttggtggaaaaagtggcctctaccgatgccaatatccttattacgggcgagaacggtaccggtaaagagatgctggcacgcgaaattcactccctttcaccgcgcaaccggcaggagatggtaagtgtggatatgggtgcagtcaccgaaagccttttcgagagcgaactgttcggccacatgaaaggctctttcaccgatgcccatgccgaccgtgccggcaagttcgaagcagccagccgcagcaccctctttctcgatgaaataggcaatctcccctaccatctgcaagccaaactgctgaccgccatccaacgacgcagcattgtccgtgtaggcagcaacactcccattcccgtagacatacggctgatttgcgctacaaaccgcaatctgcccgagatggtggcaaaaggcgaattccgcgaggacttgctgtaccgcatcaacacgatacatctcgagataccttcgttgcgcgagcggcccgaagacatcatcccccttgcagagcttttcatcgcccgcttctgcaagcaatatgacaagccccctgtcaagctgacggacggcgcctgcgagaaacttacgctccacccctggtacggcaatatccgcgaactggaacatgccatcgaaaaagccattatcatctgtgacaacgaaacccttcccgcagaactgttccagctggcacggcgaaccggcactcccgaagcagccgcatccacgctcgaagaaatggaaatgcagatgatacggaagacgctcgacaaatgtagcggaaatctctctgccgtcgccgcacagctgggtatcacccgccagacgttgtacaacaaaatgaagaagtatggcctttaattattcattccgtgttgccgtcagtctggcagtagcgctccttgcaggggtgatgtggactgtggacgtattttggggcgcgctctgtaccgcgctgcttcccatagccttgtactggcagcagaagctataccgccatcatgtgcggaaagtgcttttcatgctcgacgccatcgaaaacaacgacaatgccatccacttctccgaaacggaaaacactgccgacgcacgactcgtgaaccgtgcattgaaccgggttgcccatatactttataatgtgaaaagtgaaacagcccagcaagaaaaatactacgaactcatcctggactgcgtgaataccggtatccttgtcctgaacgacaatggtgccgtatatcagaaaaacagcgaagccctccgtttgctgggcctcaatgtctttacccacgtcagccagctgaaccgcgtggatccgcgtctttcgtcccttcttgccaattgccgcccgggagacaaattgcaaatgcctttcaacaacgagcgaggcactgtcaacatgtctgtccgcgtcagcgacatcacagtccgtaaagaacatctgcgcatcctcgccttgaacgacatcaacaacgagctggatgaaaaggaaatagattcctggatcaggcttacccgcgtactgacgcacgaaataatgaacgccgtcactcccataacctccctgagcgatacactgctgggactgaccgaggcacaagcctccaaagaagaaatcagaaacggcctgcagactatcagcagtacaggcaagggcctgctctcttttgtggaatcataccggaaattcacccgtattcccacccccgaaccatccttgttctacgtaaaaagctttatcgagcggatggtcgaactcgcccgtcaccagcaccccgatgtccgggtcacctttcatacggacatcgcgccaagcgaccttattctatatgccgatgagaacctggtatcacaagtggtcatcaacctactgaaaaatgccatacaagccatcgaatcggataaaaatacagataaagaaggacatatcaacatacgtgcctactgcaacgaagcggaagccatactgatagaaatttccaacaacggacctgccattcccaatgacattgccgaacacatatttatccccttctttacgaccaaagagggtggaagcggtattggattgagtatttcccggcaaataatgaggctttccggcggaaatttatccttattgcctggtaaagaaaccacctttattttaaaattcaattgaactattttagatttgtatttgttaaacacattgcatatctttgtactattagacataagaaacatcacatttcaaactatatagcatagaatttatgatatttacagcaggaaacatactacttataggttccatattacttttcgtcagcatcattgtcggcaagaccggctaccgtttcggagtgcctgcgttattgcttttccttgtcgtcggtatgctgttcggcagtgacggattgggattgcagttccacaacgccaaggaagcacagttcatcggcatggttgcactcagcatcattctgttctccggtggcatggacaccaagtttacggagataaagcccatattgactcccggcattgttttgtcaactgcaggagtgctgctcacggccctctttaccggattatttatctggtggctgtccggcatgagctggaccaacatccacctgccgttgataacctcccttttgcttgcatccaccatgtcatctaccgactcagcctctgtattcgccattctgcgttcacaaaaaatgaacctgaagcataatctgcgccccatgctggaactggaaagcggtagtaacgacccgatggcatatatgctgacaatcgtgctgattcaattcatccagtcctccggaatgggagttccccagatattgggctcttttgccatacagttcattgtcggtgccgcaaccggttatttcctcggaaagctggccatccttatgctgaaccggctgaatatagacaaccaggcactctatcctatcctgttgctgtcctttgtattcttcaccttctccatcaccgacctgctgaaaggcaacggttacctggccgtgtatatcgccggaatgatggtaggcaataacaaaatcatgcaccggaaagagatttatacttttatggacggactgacctggcttttccaaatcatcatgttcctctgcctcggtctgcttgtcaacccccatgagatgctggaagttgcagtcgtggcattgctcatcggcgtcttcatgattgtcgtgggacgtcctctcagtgtttttctctgcctgctgccttttggcaagagaatcaccctcaagtcacggctattcgtatcgtgggtaggattacgtggcgcagtacccattatctttgccacctatcccgtggtggctaatgtgcccggcgcccatgtcatcttcaacatcgtatttttcataaccatcgtctcactggtcatccagggtaccacagtctcctgggtagcccggctgcttggcctctccaccccgctggaaaagaccggaaatgatttcggagttgaactgcccgaagagattgactccaacttgcacgacatgaccattacacaagaaatgctggagcaggcagacaccctgaaagacatgaacctgcccaaaggcacactggtgatgattgtaaaacgtggcgatgagtacctcattccgaacggaacattaaaacttcatgccggtgacaagctgcttcttatttcggaaaatagcaaggaataagaattacagataagtttctatccgttccagggtaagaaaaaagtggaaactatttgctttgcatcactataagacctatctttgcgcagttttaactaaagtgtgcaacagctgaatggaacaagaacaagggttcatcgattatatagaacaaagcattattaaaaactgggatcgcaacgccctgacagactacaaaggaattacactgcaatacaaagatgtagcacggaaaatagccaaattccatatcgtattggaaagcgccggcatcaggcccggtgacaagattgccgtttgcggacgtaacagtgcacattgggcagtcgcttttctggcgacggttacctatggagctgtcattgttcccattctgcatgagttcaaggccgacaatatccacaacatcgtcaaccattccgaagccaagctgctgtttgtcggcgaccgggcatgggaaaacctcaatgaagaggcaatgcccctgctgatgggtatcgtactgctgacggacttcactccggtagtttgccgcaacgagcagctgatggaggctttcgaacatcgcaacgtcctctatggcacacgtttccccaagaatttccgccccgagcatatcagctaccgcaaggaggaatcacccgaagaactggctgtcatcaactatacttcgggcaccacgggatattccaaaggggtcatgctcccctatcgcagcctttggtccaatgttgcatattgccatgagatgctccccgtacgtccgggcgaccatattgtatccatgctgcctctgggacatgtatttggtatggtgtacgattttctatacggtttttccgcaggcgcccatctgtatttccttacccgtatgccgtctcccaagattattgcacagtcattctccgaaatcaggccacgggtcatttcgtgtgtaccgcttatcgtagaaaagattatcaagaaggatatcctgccccggatagacaataaaataggcaagctgctattgcggatgcccattgtcaacgataaaatcaaggctgacatgcgcaaaaaggcaatggaagtattcggcagtaatttcgatgaaataatcatcggaggagcaccgttcaatgccgaagtggaacgcttcctgaagcagataggcttcccctataccattgcatacggaatgacggaatgcggccccatcatttgttccagccgctgggaaacattgaaactggcctcttgtggcaaggcaaccacccgcatggaagtaaagatagactctcccgaccctcagaacgtggcaggagaaataatctgtaaaggtgccaatctgatgctgggctattacaaaaatgccgaagcgacttcccaaatcatcgatgtaaacggctggctgcacaccggcgaccttgcaacgatggataccgaaggatatgtcactgtccgcggacgcagtaagaacatgttgctcacagccagtggccagaacatctaccccgaggagattgaaagcaaactgaacaacatgccctatgtgtccgaatcacttatcgtattgcagaacgataagctcgtggctcttatctatccggattttgacgatgcattcgcccatggtatggaacaatcggacatcgaaaaggttatggaggacaatcggaatgaattgaatctgcaattaccggcctactgccagataacaaaagtcaagatacacttcgaggagttcgagaaaacggcaaagaagagcattaaaagatttatgtatcaagaagtaaaagggtaaggggaatgtgtcaaaaccttctttaacgctttattttaggcgcggatgacgcagatttcacggatttagtttattgaatccgcattattccgcgtaatccgcgcctaatattataacattataaaagtcttcatgtgcttttgacacattcgcatcctttttgttaacaaaaatagaagcaaaggaataaacggctaataagtgttataaaacatacttttttagttggataatttgcagatttatcaaaagtacgtatctttgcaatgtgtttttcatagtattagatttaaggttaacaaaggttggagtacagcggtactcctttttttatgcccgtaaatcagatattcccggaaagcgggtcaacgtaacaatctgaggtattttatatttaagcatataatttagcaagtctatataagaaaaaagctctatctcttactcctctgaactgtgctctaaatgctttgattttagcattgaatgactctgctgcggcattggttgccctcctttcaaaaaaattgattatattcagataatgtgtttgtatagaacgtgcgacccttccaaaggtgaggaaccctgatttatctacttcatcataccaccttgccagccttgtcaaagcaatatccttaaacttacactgatgatagattaagcctaaccgcatagacagataatatcctttctttatatcgggatattccttgaaaagaatttcagctcgtattctttgagactgagtccataaggattccttcttgtaaagcagataaatgcttctcgctaacaactgctttcttgtatctccattagcgaaaacaggtgcatgatacatctttccacaggcctttgcataagcaatctgagtggactcttcatccaaagcctcccagcgagcttttacacgcatctcctgcaccgcttcataagctaacttctgtacgtgaaagcgatcggtaacacgtttggccgcaggaaagcagatgcgggcaatctgctccatgttaggagccatatccaaagtaatctcgcgcacttggtaacggcggagacgggatagcttaagcaggacagaagtgaccgtatgaacgtccgtacctttaatgatagcaatcatactacctttaccaccgtgagcttctttattgatcagtacagtatagagttctccacgcgagagggctacctcatcaatacagatataagcaccgatattcttttcgaatagtagccaatcctctgcatgaacaagttggtcccaatggagataaccacttagatggttacggtattgacgctccaataaatctccgtcaactccatataaaacacctaagagcttacaactgatcggatagctatcaatatagttcttttaaaaaagacgcaaaatcttgcgtcatacgagtaccttcagccaccatacgccagttacgagagatatactcattatgcttctttaagatccagcgacgacgacgaatattaaggaagaccttcttgccacgaagaggaaaatcctgaacaataacaggatcataaaagcctttactctcagtatcctgatctgcatacttctcaggaacgatatttttttcctcaaggtagatcacaacttcatttacgctttccttcacatcaacaagagcaaagtactctaaagtgccttcaggaagaagaaggcgataaccgtttaactccataagctatgaatttggagacaaagataataatttataaatttacccctcaggtttttacattgaccccggaaagcctcttcagtcccttcaatacagatttatctttcacctccatgatgctgatggcatagccgccaccggaagcagctttcagtttcaagaccgttttgggagaaacgataccttcacggataacataagcttgcggatttgtcttataatcggcatcttttgcatcggcatagacggttgcaatatactgcttgtctgcatccaggaagtccagtttcagagttgaagcatgtccgtgctcactgctggtgcaaccgataaaccagtcattcgtaccttttgccttacgggcaacagtgatgtaacgtcccggctcagcttccagatagcggctgtcgtcccaatccacagccacatctttgatgaactggaaagcatccatgaaacgctcataattctcaggaaggtcggcagccatttgtagagggctgtacatagtgacataaagtgccagctgacgcgccaaggtagtattggcatgcgtatggctgttcggattcaacttattgatgtccatttcaaagataccgggcgtatagtccatcggaccaccctgcaaacgggtaaacggaagtaccgttgtgtggaagggcttgttaccggcaaaagcctcgtactccgtgcctcgggcagattcattgcctatcagattgggataggtacggcataaaccggtcggacgtaccgcttcatgggcattgaccattatcttgtgtttggcagcttcggtcacggcgtataggtaatggttgttcatccattgtccatagtgatgctcgccacggggaatcatattgcctacgtagccactctttaccgaattatatccatatttattcatcagacggtaggcggcctccatgtgccgctcatagttacgaacggaagccgatgtttcatggtgcatcatcagacggacgcccttggaatgggcatattcattcagatacttgatgtcaaaatcgggataaggagtcacgaaatcgaaaacataatccttggaattaccgaaccagtcttcccaacccgtattccaaccctccaccaatacctggtcaaaaccgtgttcggcagcaaagtctatgtacttcttcacattagccgtgttggccggatgaatgccgttcggtttcaccttggaatagtccgtatcatccagtttcacagaagggaggtcaaaagtatatgcccagggctttccccctgcaatcatttcccaccatacgccgacatatttcaccggcttaatccaggaggtatcatcatacttgcaaggctcattcagattgagaatcaaattggaggccagtatctcgcgggcatcatcactgactatgaccgtacgccagggagtatggcagggagactgcatataccctttatttccttgggcatccggagtcagccaggattcaaaaacgaggttcttgtcatccaggttgagatgcatgcaagagtagtctaccaaggctgcctcgtgcaggttaaggtacactccatcagctgttttaagctgtatggaagtctggacacccgtcggcgaaaagacagtttgtgacgcattgtcactcacagctccctgcagcagtccacggatttcagagagtttggactccgtgtaatcatattcctgggtatcataatctcccggaatccaccaggcagtatggtcgccggtcatggcaaaccgggaatgctcttcctttatcacaaaatataccaggttcttctgttgcgggaactcataacggaatcccacgccgtcatcatatacccggaaacggatattcataaaacgggcggtagacggttgctcaagttctaccagcaattcgttgtagtggttgcggatatcttttgtttccccccacaccggttgccaggtttcatcgaaagtggaagtagaagtccttactactttgaaaccatccatcaggctggtagctcctttcagttccaatcccaacgtactgggattgatgacaggagcccctttataatccacctgataggctggtctcccgtcttttgtcagttcaaaatccagcttcaccatgcccgaaggggatgaaatgccttcagcattccccgccagggcagaaaaaagcaaagccgcgctaagtacaaatttcttcataataatgatatgttttttgtgttaatagataaactcaatgatatgttcctttccatcatccggcaacctcagcaggcaagtccccagcttcttgtcaggacaccaggcagttatcgtaaactctgtctcccgattttcttccagctttccgacattcgttttcttgattttctgaccgtccagcaaagctgttttcggcatctgttccgtatagatgcagaacatcaggtttcgttggccgggtaagctatatttctcaccggtccgtgtacctactttcagcgtatagcctttgtcggtagtctggcaagtaataggagtgcgcatgaactctccacgcaaatatcctaaatcagttcctgcatcttcataaagcgagaaggtagtttcactgcccgctgcagcaggaaatatctcaaacgtaaccggatagaccggtttctcatccgtatagttcatgaccggcatttgaggtatgatacttccctgctttacaaacataggaatagtattgaggggagcatccaccgtcatccattgctcaccgctatatgctgtgtgtttgttgttgtagtcaatccaagttccttcaggaagatacacattcttgtttcgcgctcctttcttcaccaccggagcaaccagcagttcgctgccaaacatgaactgggcatccgtagagaacgtttccatatctgccggatattccagaaacatcggtcgcatgagaggcaaccccgtttcgtgtgcttcgcgggcatacgtatagatataaggcaaaaggcgatacttcaattcgatggccgccttggcattcttctcggcctcttcgccgaacagccacggctccacagccacgttgccctcatgatgaatgcggctcaggggattgaaagcgcccatctgtatccaccgcgtataaagttcagccatcgcaggataatcctctatatctccgcaataaccggtaatgtcacaagtagtaaaaggaataattcccaaaccggcagacaacagtaccggaatctgattggccatctgtccccaaccctgcgtcacgtcatcaccgtttccacagtcaccggtccagccgaaagtatagcgttgcaagcccgcaaaagcggcacgtgtcatctggaatacgcgacggtcaggattccttttctcaaactgctccttcaccaccttatcccacgtaaggccataaacattgtgaatctcatcatgcatgcccaaatggtgtttcatcaccaggcgttccgtctgctcctcattgctccaggcaggttcacccatatcagtccagaaaccggcaataccatcatcaatgggcttctgctgataagctccccaccagtctgccacagcaggaagggtgaagtccactacgccacaattaccgccccagggccagggcatgtcataactcctgccgttggtggagtcctttaccagataccctaacctatcggcttcctcccattgccgcttattggcttgtgaaatgaccggatcttgcgaaaccaccaccttgaagcccatatccttgaggtctgcaagcatctttttcggattctcgtagttccctttccgccactcaaaatcctgcaaatactgtgtccagcctatgtcctggtaaataacatcacaaggaattccgcgcttacgatagccttcagctatttcataagacaatttctcgctcgtcagcagtccccggcattgtgcaaagcccaatgcccatttaggaggcattatgggttttcccgtcaggtcgacatattgtttcatgatttccttataatccttcccgaagatgaaataataaatcatctctcccccaggagcctcgaaactgtagtaatcgcggctttccgtaccaaacttaaattcggtcttatacgtattgtccaggaaaataccataacgataactgctcataaagaacggaatactcttgtagagcgggtcctcaacggtactataacaaggcttgtcactgttccacatcttgtaggcttcgccgcgacggtccagcttgccggtcttttctcccaagccgaagaagtgttcgtcacgacggagggtcttgtattccaatttgcgctgcccgttactgatatgccccttatcggcataatcactgaacagcagtttctgatacttgtcgaatatctgtaagttaaacggagacttgtttacccggatacggagtttaggggtaaaaatctcgtagcaggcattctgttcgtccacatggacggtaccgacatcctccaggtcctcattgacgacggcaaaggaaggattattccgctggaaactaccgtcgggagaaaaccatatacgtaccgtagactgactacacagacgtaattgtatggcagaactgtcatttaaatagaaggtcacactccggtcgtcactggtataggaagtgcagtctccggtgcggttctgtgcattcgcatatactgaaaatgcacagacggcaaaaaataaaaatatatatttcttcattactataatttgtttgttcctttattggatattcttattccatcacaagcatgctccagtacttcagcaagggcaaggtaaaggtaaccgtgccgtccttctgttcgaatgccagttcctgcgaagcaccggcatggaaatcgggcgatgcaacccatatcttgttcactttaccggaaacattcatcttcaacggcacgtcggacaccagacgcggttcgggcattgttccgttcagatccctccagcttaagttatccgcattgaggaagttgagcagatgaatgacttgcctgccatttacattcttggcatatacagtgatggcagacttctgcggcggccatgcattcagagaaagattccgcgcagcatccgtacagttcagagaaacggaaatctccgcctccgtatctttatcacgaagcaggttctgataagccgtcataaagtcataataacgaatcatggctattttcagtacatcgttcatctgcaaagccgtgcttggaaagtactcgcggcatagcatgtggtcacccaattccaaatgagagcctcccaaagcaaatatcacagcatccgtcagcagcacacccggtgtattgaactcaccggtactgctacctgccttgtcatagttcatatatgcggcaaacaccgttttcaaggcatggttgccatactggtcgttcgctttgataatggtgtgcagatccttgaagcctgcctcatcgccccatacttcattataaaggaaatccactttacccgtaccagctatctgggaagctccatagctggagacggcattcatcaccaaacgcttgtccggatgcttctgtttcatggcttcgatgaacgaagcatatcccttaggcagatttaccttattgccatcatagtcatagcggtcaccccggtttcccagttggtctatctgataaccgtcaaagtccagattggcataaacatcatcgtttctctgggcaatatatgcctgccattccgtattggcgggattgagcaggaagatattacttttccaactggagggcaagtcatgcgaatccttatccatgcgtcccgtgttcttgaatatgtaccattcttcctttaccccgtcggaaacggcatcgtccaaagctccgaaacatagattgtagaacatggacttcatgcccaggctgtgttgtgtagagatatacttcttcactacctcggtatagacctcccggttggcaatgtccttatagacctcgtccagatactcacgcgtaccgcccaacggccaatgatgcttgttgtgccaatcctgaaactgtaccccgttaatgtggcaacggttcaggaaagccatctccttctctatcactccatccacctttttcgaagcatcaaaagtggcaacgaaaccataacgtggaaaacgtgtccagtcactggatacatctacggcaatagtaccaagaataacctctgttccattctcttttgtacggtatacatccaccagataaccggtataatcggttgccggagcagtccaagtccaagtagtaccgacagcagcctgctccgatacaaccttatccattgtccggtagcggattttagctccggcaggaagggcgtcagctgtaaaagaaacactctcgcccggccggtaacatgccttgtcggtagtgagattgaccgtcaagtccgaggtgactggggttacttccgtaacccctccactctctccgcctccaccggtaccgctaccggtatcatcactctccttgctgcatgcaaccagcagcaaggctaccattgttgtataaactatcttcttcatctattgtagatacctattgtttcacgattgaaattgtctcttccagctgattcaaagtaatcagataggaacctgctgtcgtaatcttccacttctggtcgatgccgcctaccatcacgtccagatattgcgctttgaacgcttcgtctgatttatcaaggaaaagcatcggttctgtttctcctgcaggctgtttgtctgctacagccggcatgaaccaggctccattccaatcttcctgcttatcacaagtaaatttcaactcaccggcattcagcgtacctttccaagtaaacacatacggattatccgttgtctgcatcggcgtagcatcaccaatcgtccaaccggccggcgtagcatcacctaccatataaatcatctcatacggagtaaattcgctcatcatcatgcgttccttaccactacggatatccatgcaaatcttgtaggccttgccgcattccccgtctttcaacacccatttattgtccgggtcgaaccctttcacaaacaccacttctgtatcggtataagcagcatcggcattcttggccttatacatgttctcccaacttccatcggaggttccgaacttgaattcccctcctttgcccacttcaaagaacttgccgaagcggaacaagtatggatcgagcacatcttgtttcatcttcacgaatccccaatccgtagcgttacccacaaaataaagctggtcgtaggcaggtgccaacgtctctgtctgggtcaatgtaagaacaccggtaaacagattggcttcgacgatgtaattatggtcttcttcgacaacaaaaggttcatccggctggtcatcactgctacgaagaaccagcaatccatctgttcctttgttgtaagagggcaggaatgagcctaaggtcgtgatgaacttaaattcaccggccacaagccggcccgtccatgtaaagataccattgtccttgcgggtcatctctgtcgcatcatcggcactccagccgcccggagtggcactacctatcagataaagggtggatgtgagcggtttataggctgtaacactgaaagcagtggtagacacctgtttttcgtcccgttctgttacagtagctgtcaagcgcgcttccaacgaaatgttctccccggcagttgccccaaaatggttgcgcaggatgtcattcaattcctccacgctctttttccatgagtattcttgtacagcattctccacagctacataagaatctgcaaaatcactgccggtcttggtcaattccagcgtataggaaattttattacccgtcccataattggttcccgtagtccaggaaagctccagggcatcatcggcatgtgcctgctcattcaaaacaacttccgtcttgctggccgtcagtacaagttcattctgtcctttatccaattccatgtaatcatcatctacacaagcagataaggctgcacagcccagtaaggcaaatacaaggtgtgaaatatatttcttcatattcttctgattaaattaattaataacccgggttctgcaccattaaggtattagcatccatctccgtctgcggaatagggaacagcaagcggttcttgttcacgttgctctttccaatggaatgcaggaatttaatggcatactctccattgttgacacgaatcatgtcgaaccagcgatgcccttcgaaagctagttccatgcggcgctcatggataatcttttcacgcatggtttcctgtgacaagcccgaaacctccggcagtccggcacgcttacgtacaatattcaaaggcacggcagcctggtcagggcgtcccatttcattcaaagcttcggccttcttcagcaggacgtccgcataacgataaatcacgaagttggcaggattggtattgtattccggagaaaccgttttcgacaccagaaacttgcgtacattgtatcccgtattggaataagagcttttgtaagccttaccgtcaaaatccggacatccggcataaagcacggtcaaatccttacgtttgtcaccgctctcatattgacccacaaattcttttgtaggctggttccagccataactgccggcaacaaagtccgaattacggggacccatgaaagtagaaagccaggaagactgcggattgtttccccaaaaatcatattccgtattgcccgaatactggacctcgaacaaagattccggcccgttattgaccaatgcatcgaaattatcctcatacttgcaggaagaaaggtcataccccaaatttgttatctcatcacacaaatcagacacctcctgataatattccgtatgattaggagccagcgtcagataaatatctgccaacatggctaaagctgcatctttgcaggcacgtcccacgttctcgtcgtcgtaagaagacttggcaggaagcaggtcaaccgcattcttacaatcggaaattatctgggcataagtctcttcgactgtagcgcgtgcaatgtctgtcggttctcccggattataaggagccaaacgcagtggaacaccaccgtacagacgtaccaatacatagtaataatgtgcacggagaaaataagcctctcccagacagcggttcttgattctctctgacacggcttcagcctccagaagactattcaacacaatgttgcattgtcctatccccacccagggagaacgccacatgtacaatgccatgccattgtcgctctgcgttatgaagttagaagcttgtatcgtttcaaggccgtcggtaccgccaccggcacccaccaaactgttacccgccacaatatccagtgtccagatacgctggttgtacatattggaagactgaagggtgcgatagcaggcattggtcagagcaatggccacatcatcggtcaccgtcgtttccgggtcaaccgtatttttaggagacttgtccagaaagtcgttgcaggaagccagcagcaatactgccagcatatatagtaaatttgttatctttttcatatccgagtcaatcattaaaagttaaagtttaatcctaagctgaacgtacgggaaatggggtaacggttctggtctattccgttaatacccacttcagggtcgaaaccggaatatccggtgatggtagccacattctcacaagatagggaaaggcgtgcattctcaatctgggctttctgtaaccactgcttcgggaaagtgtatgagagtgtgatattcttcaaacgcagataagaaccattctccacaaagcggtctgacacgcgtgtattctgattggggtcgccgaacacggcacgcggcatcgaattgctggtcccctctccttgccaacgcttcagtacgtcggtagtctggttataggcagctgccataccggtattgtcgatattgttggcattgtatatcttatttccggctataccttgtaagaaaacagaaagttcgaaacccttataggaaaggctattgttcatggagaacagccaacttgggttcgggttaccgatgacggtacggtcactatcattgatgacaccatcgttgttcaaatccctgaaacggatatcacccggctcagctcccggctgcacggcatgtgtattcacttcagactggttctggaagattccgtccgtaacatagccgtagaagacattaatgggatagtcctttgccagcatcgttacataggagttattgatttggttaatgtaataaggaacgtcgctgttcaaatccttaattttattcttattgtaagtggcggtcaggttcgtttcccatcccagttcaccggtaagattgatggtatgcagactcatttcaataccttgattacgtacttttccggcattggtatacgtggttgtagtatcttcaaatcccgatgtgatggggatagacgcctttaccagcatgtctctcgtctccttcagataagcatcgaacgagaacataacgcgtgaattgaacagtgaggcatcaaaaccgatgttggtttgtgccacctcttcccaatggatatacgggttggcgagagtagaagaaaccagcgctgtctgattgccgctcgaaatgccgaaaggatatacactggtattgtaggatgccagatagctgtagtttccaacacttgcctggctaccggtcacaccgtatcccgcacgcactttcaggtcattgatatagtcgttttttggaaaccacttttcctgagaggcacgccatgccacagatacggaagggaaagtaccccagcgatgtttcttaccgaaacggctggaaccgtcacgacgaatggttgcagtcagcaaatagcggtcttcgtaagagtagttgacacgtgccatgtaagagagcaatgcccactctgtctcgtttccaccgatggcatacatttcctcgccattatccatttcgtgcacattgtcgaacataaacacattcttctgcgcattcaggtagtcgttggtgttccattgggcagacataccggccatcaatcccacacgatgtttttctgaaaaagtatggtcgaataggaaatagttgtcccacaaataagtgaacgacttgttatcgctcttataacgtgaagtctcctctgtgggagtgggtttccagttatacttgggggtaaagttgtctatgaaccagaatttggcatcgtagccgaaagtacttttaaacttaagccatttggtaaaagtaagttctgccgtcaagttggccaggaagttatatccatcagtctgactcttgttcagttccgtcggtccaatggggttgcgcgtgctgccataccattccgagttaccatcagggccactccaactgccatcttcattcttcaccggataaatggggagcgctttcagcgcatcacctatattatagctgcccgacttcttcgtatcggcactgaacgtaatgttattggagaacttcaaccatttcaagacttgcgcatcactgttggactggaatgtgaagcgacggtaattcacactcttcacgataccggactgatccagaaaaccaccagacacataataatgggatttctcgttaccgccggaataacttaccgtatagttctgcatcacacccgtacggagcaattcatccatccagtcggtacctgcacccaattcagaaggattggcccattccggattaggattgcgtccactgttcaccatcatgtcattactcaactcggcatactgcgccgcgttcaataaagaaggtacgttcgtagcattctggaaagagtaattggcagatacagcaagttttccttttccttccgtaccgcgtttggtggtaatcatcacaactccattagctccccgggaaccgtagatggctgtggccgaagcatccttcaatacatccaaacgttccacatcggccatatttaaggaagacaagcccaagtcggtaggcactccgtcaatcacgaccagcgggtcgcagttgttgatagaacccaaaccacgaatcttgatggatacattgtctcccggtttaccggcatctacaatctgcacacctgagatttttccctggatggcttgtcccaaattggatacgggggaatccttgatatccttgttaccgatggaggacactgctcctgtaaggtcgcttttcttcatggtgccataccctatcaccaccacttcatccagcatttcggcatcttcagacaaaactacctgaagctgtttctgtcccttcacctgcacctcttgagtcttatagcctacaaatgaaacgacaagagtaccgttcggagacatgttcaaagagaaatcaccgtcaataccggttattgtcccatttgtggttcctttttccattacactggcgccaataaccgtttcaccggtctggtctttcactacaccttgtactgtaatttgctgtgcgaacatgcacatcggaagtaacattcctatcagacaaaccatcatccgtagcctgctgattggcattttgtacttttgcataatataagaatttaaagttaataataaaaacataaatcacatgtgtcactctttccgaagaggaacaatgcaaatgtatcagataagagaagccaatagtggaggaaagagtaaaaaagtagtggtttacatcattcaaaaaggcttaaaccactatataccaataatatataaaattattacccaactaaaaaagtagtgaaaatataagcgtaaaagagacacttccaagcttcaaaacccctattctcagttcttcgacttgccaattgtcatcacttcctgttccaacaagtcgcggtcaccggcagccttgttgcgaaccttcgtacgatagttataaatggtggtaacagaataccgaaggaactgggctatcttcacgctgtcagtaatacccaaacgtatcaatgcaaagatgcgcaactctgtattcatccgttcgccggctttcaaggatatttgctcatcatcggcaagcagggcattgaagtcttctacaaaagtaggaaacagctgcaggaaggtattatcaaagttggtatagaattcctttaattccccctctatgaatttagaagacttgatgttcttgtagagttcctccacatttccggtagcggcaatctttcccagcgaccggcggtaattgtccatcttttccaaatagaccgagcactggtccatataacggccgatatactcctccttcagataggagttttcggcaatgctgtggttggcctccttgagttgtgcattggaaaggtgaagctcatcattcagctccttcaaccgtttgttggcgtcaatcacttccctgcgggcggcagccactttcttcatctgcttgtatacataaaatatggcaagcaacagaaaaagtgaaagcaggctgatagataccagtgcccatttcatctgctcctgctgcttctccgtcttttgctggtaagcatcattaatgataggaaagatttccagaatctccagcttgcgtaaccgggcattgcaggcggctgcatcttccatacatatctttacataagaataggcacgctcgatgtctccttcctggtaaagcagtacggcgagcttgcgtaaagagatatattcacggacagcggttttcatatccgccatagcagaaacaatcaggtattccttttccttctctttgtcccctttcagccggtaagactctgataaagtataggcacaaatcgcaacgtcgtgttcatagtccttctgcagcgccagataatccgtcagcaaacggatggccttgtcatattcattgcgtacattatactggtcggactgaatcaaggtatgtatcagaagattatctttattgaccaacagcaacgaatcacgatatttgtccgtaagctccgtataaagcttcttttcatatgccgtcacggcataatcggccataaggccatagaccgtacggtagatatggtaataatatggatggatatccaccggtaaccggtctatatggatattccgcatcaaatccataacttccttatacataccggtcattcccaaaacatctgctttattcatgcgggcattgtctatgtattcccggtttccaagacgtatggctatctgttccctttcctcggccatgtgcaatgcagaatccgtattgaacgaacggtactcatccagcaatgtgccaagaatggcaaaacgttcttcatccggtatctgccgatgcaactgtcttttcaattccaccagtttcagctccttctgctccatatatatgggacgctcctttatcgcctggtccagtttcagcagcaaagaatccgcccggctgctgtctgcagcatgaaggcggcacatacagatggtacaaagacacaagaatatgattatatttttcatccggctttccgattagttaaaggcaatactttttgagaatcctcatgcaaaagtaattaaaataccataaaaacctattctactatcattaaaagctcgaaagcagagtgataaaaaggcatactgcaagcaaaagaatcaaaatattgaattacctttacggaaaatccaaagaaagaccatatcataaatatcatccgagcatcatggatatacacacatttattgccaattatcaggaagctttcggccaacacgccgaactccccatcgccttttggtattcagaccgaatgggggcatctacagagaaagtaaccggttgtctcttcaaatgcatgaaacaagtcagagacggcaaaatcgtcagtctcagcaacgaaacaattacctgcggaggaggcaagttctataccggatttactgaaatgcccgagcgcgtcccggggtttgtctccttgaaagagaaatacaagaagactcccgaaatggtggtagattttgtcaatgagctacagatttccagaactgacaaagcctatctgcattttgcccgcatagacaagataccttcctttgatgaagtggaaggactgctgttcctgccaactcccgacattctatccggactggcgacatggaccttcttcgacaacaatgcatcggatgccgtggcagccccattcggctccggctgttgctccgtcattacccaaaccatcattgaaaaccggaaacaagggaaacgtactttcctgggattcttcgacccctccgtccgcccatacttcgaagcggacttattgagcttcactatccccatgtcccggttcaaggagatgtatcacaccatgcgcgaaagctgtctgttcgatacacatgcctggggaaaaatcaaggaaaggatacagctgtcccaatcaggagacgtacatatcctcccctctcccatttccttccccatccttccggacatttatctgcaggaaatcagaatagaagatgccgcagccatctaccatgccatcgacacacaccgggactacttaagaacatggctgccatttgtggataatatgcgcacaatagctgatgaagaagcttttttacgtcaggtactatctgctcctgccgaacgaaatgaacctatattcggtatttggaaccagcagcatgaaatctgcggactgataggtttccatttctccgatttcgacaaccaccgtacagaactcggctattggctactgccggaataccagcaccggggcatcattactgaaagtgtccgcaagctgtgtctgtgggccgtacaagaaaaagagataaagcggatacaaattcgctgtgccgtgggcaatgcagccagcaacgcagtaccggttcgcctcggtttcatccatgagggaacagaacgttgcggagaactgctggcttctggagaatatacagacatacatatatacagcatcttgaaagaagaagtgctggccaacctcaaacgataaaatatcaaattatatatcaactattgaaattatacatggaacaacaacctcatctcaatgaccacaacaagcaggagtaccctcctatgcatacaacggagcacatcatcaaccaaaccatggtaaggttattcggttgcggccgctccatatcagcacacatagaacgaaagaagagcaagctggactatcgtcttgccgcctgccccacggaagaagaaataaagaagctggaagaggccgtaaacgaggtaatcgcccgacagctgcccgtcacaacagaattcattacgcaagaggaagcgcaaggacgtttcgacttggaacgcctgcccgatggtgcttcggaaacggtacgtgtcgtgaaagtaggcgattacgacgaatgcctctgcatcggagtacatgtggagaatacatcagaaatcggaaccttcaaaatcatcagtcacgattgggacgaagaagccaagcgttggagaatgcgttttaaattagtctgaaaatctatcaattttaaataaataagatagcaaaatggcattaaacaagcaaataagtcagtttttcaatgacaaatagtcaataaagtcagtaaaaactggttggcataaggtttgcaatattgttagcgaacgacggttcaagaaacggatggtgaaaacccaaaaggcagacacccgaagacaaagaaccggagttcaaaactaaacagcatgtttaacttaaacaataggagactataactatgatgcctgtaagaagaaaccaaaattggttaccgagtatttttaatgatttctttgacaatgattggatggtaaaagcaaatgccaccgcccctgccatcaacgtattcgaaacagcaaaagagtacaaagttgaattggctgctcccggtatgacaaaagaagacttcaacgttcacatcgatgaagaaaacaatctggtcatcagcatggaaaagaaaacagaaagcaaggaagagaacaacaaggacgaaaagaaggaaggccgctacttgcgccgcgaattctcatacaccaagttccagcaaaccatgattcttccggacgatgtcgataaggaaaagattggcgcccatgtagaaaacggcgtgttgaacattacattgcctaagtttacagaagcagaaaaagaaaaggccaagaaattcatcgacgtaaaataacgcccggccattaaaaagaaaatctcccgctgcacaagataatgcaacgggagattttttatatccatagccatacggaactatttcttcttccctttcagaaaacggtctgtcagccacttgcgcaccggttcgtcgtatagtttcaaacaagcataagcaaggacaacagctcccacgaaagtaagtatcatataagggataccttctgccattgtagcgttattgttgcatacccaagccgtataagtgtataccagcggataatgggtgatataaatcggataggaaatatcccccaggaacttgcatacggcagtagagcgcttaccggtcaccttgccgccggctcccatcgaaacaatgaccgggaagatgcagataatacagaaagcctcgtaaagcccgttcatccagtaaccatcctcacctccgatacggggaatggaaagaaccaccacaatcagcaggctgcaccaccagaaagcacgcttttcaagccgtatcagccagccgaggcgtgacagaagcaatccgccgaagaacggatacatcagccggaccatacccacatactgctgttcccagttcaaggcccaaccacccacaatatcgccggcaggagcagtcagacaacggtataccgtaaaacaccctgccacaaataccagcaccgacagggccaccttattgaacttgcgtacaaacaacgcatacaggatattaccgatatattcataatagagcgaccatgccgggccattcaacggatgcatttccgtccagccgcgaatgtcgaacttcagcggaagaggaagcaaggtacagcccagcaacatcaccagcagcattgttccgatggacgtattctcgataggtggaaaacaaggcgactcctgaaaatagaaaaaggcagcgcccacaatgcttcccataatcaccataggatgcaggcggatgatacggcgtttgaagaaagtgcccacggtcatccggttccaacggtcatcataagcatagccgataacaaaaccggaaagcatgaagaagaaatccactgccagataaccatgattgataatttgagtaagatggctgccacctgcatgtgcttcaaaaagatggaagataataaccatgacagccgccacgccacgaagtccgtcaagaatctcataatgcggtttcgaggcaagataagtagtctgtgtattcattttggtataagatatttatttattcgcgtgcaaagataagagttttttccaataagggaactgataaatatcatataaactctatcaatcaattactaagcaaaacagatatttttcatcattagatacatatcactacttgcacccttttttccgcacaaaaaacagcttttattatccataataaaagggctacaccttttcctcctcatggtgtagccttaaacacaaaagggtgtagctatccaaggcaaatggtgtagcccttcttcaaaaaagagagccaaataggataataataaagaaaaatcagttaactacttttcttataactttttaccgcccacagattgaagaccaatgcaaagaccaacacggctcccagttgcggaagcagttcggcaaatccgccaccacggagatagatggtacgcatcacctccacaaaatagcgtagcggattgatgcacgtaatccattgcgcccactcaggcatactgtggataggggtgaaaagaccactcatcagaataaggataagcatgaagaaccacatgacaaacatggcctgctgcaacgtggtcgaatgattggatatgaccagcccgaaccccgacaccaccggtagaaaaaacagcgccatgccgtagatagtgaggaaatgtcccgccggcagaatgccgtaaagtacccatgccagaacgaaacagatggtcagcaccacaaaacctatcagccagtaaggtatcagcttggcggcaatgaaagtgaacttgccgacgggggtgacatttatctgctcgatggtgcccgcctccttctcgcccaccacattgagggcagggagaaaaccgcaaatcagcgtcagcagcattaccatgagggcaggaatcatgaaaagcttgtagttcagcgtggggttgtaaaggttctgcgtagtgatgtccacccggggaagcggcttcccggcaagcccttgcgaagacgactccgaacccagttcacgggtatagtcactgatgatggaagacaagtaggatcctcccagactgcccttcgtgccgttcacggcattggccgccaccagcagacgaggcgcctctcccttcacccaatccttttcgaaatcacggggaatctccagcacgacatctgccgaacctgcttcaatggccagcaaagcctcatcgtatgtatcgggaagcgctgtcaggcagaaataagtggatgcaccgattttatctaccagacggcgagacaagacgctgtggtcattgtccactatattcagattgatgttctttatctccagattggcggcccagggcatcagtatcataatcatgcacgggaaaatgaaaatcagcttgggcaggaaggagttgcggaacaactgcttgaattccttttcaatgagaaactttatcataagacgatattttaaagattttagacataagaacaaaagaacagatttcccgtatccttttgtccttatgttcttctgcctgaataattaatataaaattcatatccgctctttactcaagccgatgcttgaatttcttgaaactcaccgttatcagcaataccgccatcgtggcaagtatgccgacctccatcagcacaagcgaaacatccactccctcaatcatcagcttacgcaccgcctggatataccagcgtgcaggaagcacagctgaaatggcctgcaggataacgggcatactctcaatggggaatatcatgcccgaaagcaacatggtgggcatcatcagcatcagtccggacaccagcatagcggcaacctgcgtccgggtgaccgtggaaatcagcagccccagcgccagggagacaaagatgaatagcagtgacaccaccaccagccagaacaagctgcccgccacgggaacatcgagcacatagaccgaaagcagaagaatggtggtcaagttgacaaacgacagcacaaaatagggcaccgcctttgccagaatgatgaaaagcggtttgacgggagaaaccagcaggacctccatcgtccccgtctccttctcgcgcacaatggagatggaggtcatcatggcgcaaatcagcatcagaataagccccatgacacccggcacgaagttgtaggcactcttcatctgcggattgtacagcagcttgagctggggtacgatggcagcggcatgcactcccggcggaagcatctcctgcccggcagaggaaatgatgtttgcggcatagcctgcctgcatagtcgccatattggggtctgtggcgtcggagacaagctgcacgcgcgcctcgccggtataaagcttgtccgagaaacgctcgctgaaaacaagcgccatgtcaatctcccctcttccgaaagaagcctccatatcggcgggagaatgcaggcggcggatgacggtgaagtattcgcttgcatccatgcggtcgatgatacggcgggtaactacgtcattcgacgggtcgagcaccgccacacgcacgttcttcacctcggtggtgatggcaaaaccgaaaaggattatctgcacgatgggcatgcccagcagaatcagcatcgtgcgccggtcgcggaagatatggaagaactcttttcggatgaaagatatgaattgtttcattgtctatatttatatttaggctcggataatgcggatttcacggattttcagtcggcggttcgcacagcttgacgagccagttgttggaatacatcgtccatcgtagtggcattgaactgccgtttcagctccccgggagtgtcgagtgcacggatgacgccgtctaccatgatggagatgcggtcgcaatactccgcctcgtccataaagtgggtggtgacaaagacggtgatgccctcgtcggcagcctggtaaatcagctcccagaactggcggcgcgtggcagggtccaccccacccgtaggctcatccagaaagacaatcttgggacggtggaagatggagacggagaaggccagcttctgcttccagcccagcggaaggcttttcaccagtgtatcccgttccttttccagcccgaggcggaggagcagctcatccgtcttgggggcaatctccgcttcggggatgccgtagataccggcaaagaggcggatattctcccacaccttgaggtcttcgtaaagggaaaatttctggctcatgtagccgatgttcttcttcacttcttcgggttgggaagccacatcgaaacctgccacacatgccttgccgccggtggggcggctaagtcccgtaagcatgcgcatggcggtggtcttgcctgccccgttggctcccaggaaaccgaaaatctcgccccgatggacttggaaggagatgtggtctacagcggtgaaattaccgaaccgcttggtcaacccttccacttcaatcaccttgttttcgtggttttccacccgttcgtgctgcaagcccggagggcagaggatgcccgcaaagcgtgtcaggatacggtcgggggtatcgatgccttttatctctccttcgttgatgaaggcgatgcggtcgcattggcgcgcttcgtcgatgatgggggtggaagcaatgatggtgataccccgctccttcagtcggcgaagcattccccagaattccttgcgggacacggggtcgacgcccgtagtgggttcgtccagaaagaggacatccggtttatggataagggcacagctaagggcgagtttctgcttcatgccgccggacaacgctccggcgcggcgcttgcggaaaggttctatctgccggtaaatgtcgcgcaccaaatcataattctcctcgatggtggtgtggaagacggtggcgaagaaattgagattctcctccaccgtcaagtccggatagagggagaagcgtccgggcatataccccacccgcctgcggatggctttgtagtccttcaccacatccagaccgcagaccgaagccgagcctccgtcggcaagcagcaaagtggtgaggatgcggaaaagcgatgtcttgcccgcaccgtccggcccgatgatgccgaaaagctcaccgggagccactgacagagagacaccccgcagggcttccacgctgccgtaacgtttggagatattagttaaagttacagcctccatacattcctattttcagcatcccgtcattcttcacggcaatctttacggcatagaccagattggcgcgctcgtctttcgtcaagatagtttttggagtaaattcggaggtatcggaaatccaggtgacaacgccaggatattcttggcgcacatccttgccataatccgcataaaccttcacttgctgccccagcttgatttcggcaagctgttcggaggtgatgtaggcacggaggtaaatctgctccatatccgccactttgaaaagaggggtaccgggagcagccagctctccggcttcggcatatttggcaaggacggttcccgtcagcggagaggtgatgtggcatttgcgcagctggtcttctatctgcgccacctggatgccgacggaggaactttgccaagtgaggctgcggtcgctgttgcgcagggtggagttctgggcgtcgagctgcttgcggaggacttcgagaagggactcggcatcatccagttgcttctggttggcggcacccacacggagcagattggacacacggtcgcgttcgcgtcgagcctgcacaatctgttcctgagtggcggctacttgcttcaggatatcaggccgctggccttccacggacttgacactggcctccaactggagtttcttcagatagagttggacggtatctataatgcctacttcctgcccgtctatcagtgtcgtgccttcctcgatgtcgaaactcagcagttttccggacgcctcggcagaaacgatgacttcggtagcctcgaacgttcccgtcgcatcatatttcggagtaccgccggtacaggcggcaaggagaaataaaaaaggaaataatttcaatgatttcatactatttcaagttataaattacggattatagtcattaattgttcagcgtatatttcagctgccagatgttcatcagcaactgcacctcatgcaatgccttggtctgtcgtgccatactttcattggtaatctcccgcagcatatcggtcacggtcattgtcccgttctgcaccttggcctcggctgcacggcggatattcccacgcagacggataatctcgtcatcatccgccatctggcggcgcatggatacaatgcccgcatcctgctgcgtagcctgcaggcgaatgttgaaaaggaacacatcccggccggtctctatctgttggcgggtattgtctatcctgcggcggtcgttcttcaatgtatacagactgccgaaattccaggacatgcgcacccccgccatgtaataggcgttgaattcatctttcaacatattcaatcccggattgccgtatgccccttgtacaaaaaggccgaaacgcggcatcaaccgggtgttcaaggctgcctcctgctggtggagttgctctccctgcgcatcgtaccaacgaagttcgggacggttgttcatctgccggtctatgttttcttcggcagccggtttcaataaaaccgtttcggaagagagatccttgcccgtaaaggcagcaagcatgctgaggtatgcacggcgggtggtctccaattccacacggtgctgcctggtgttcagttgctctacgctgactgcatccaggtcgctcagggtggcgatgccattggctatatagtcggctacctgcttgtgggttcttcctaaatcttcttgcaagaggctgttctgtttcagctgttcgtccaacagcaggatgccgaaaaagagctggttcacccggtcagtcaaggcatacatgtctacatgctgtttttccagttccacttccgaggcggcacgcgtcaatcgttttctggaacgtatatccccaccatcccagagggtctgctgcacttcgagcatcacctggtactggtctttcgaagcagtcttgatgtcgagattagggatttcgaccggtagccgggtgatgtcactctggtacgtggccttgccggatagggaaaactggggcaagtaaccttttccggcattggagaggtcgtacccgcatgccttttctatcagtccgtattgcctgaccaacggataattgtcttgcgcccggcgctggcactcttccaacgtgagctgggcatgtgccagcatggcggcaagagaaagggtaaaaaagaaaacggttcgtttcatatccattctgtttcttgtttattctacatggttttgttctatacacatgcaaagataaaggcataaccctataaccttacaatccatttgtgcgcaaagatgttctaatagtacgacatttcgtagaaaaagacaaataataggaacactttattatctttgcggtggaaatatacattattcataaagggaaagatatggaaaagaacaaaccgataagcgtcgcattcgaggacatccgcaacaatccggattttatagaacattccgaatacagatttataaacgacgatttgggaatggtcatcagttttcaagcaatgggattcaggctattccgcacccagcaaccttatcgtgccaaagaaggaaggattgtacgcatcatgcaaggtaagggccgaatctccatcaatcttatcgaatatgaagctacagcccacgatattattatcatccctgacaattcgctgatagaaatatcggaagtcagtcccgactacgaattccaagtcatcatgcccactgccaattttctgcccgtactacagaattccattctttcggaagcttatacacgaaacggaatccgcctttcatgcaacaacgaggaatgggcacacatcagcagcttcttctctttattgtggaatatactacattgtttgccctaccgccgcggagctgtacagcacttgattgtctcacttctctataaccttaagtatatccacgagcacacatgcaagtcaactccggcacgcctttcacgccaggaagagctattccgccgcttcatcgctttggtgaaccaacacagcaagcacgaacgcagcgtcaacttctatgccgacaaactatgcctgacaccgcactatctgagctcggtgatacgtgaaacaagcggacaaaccgtgatgcaatggattaatcaagcagttatcctcgaagccaaagtattgctgaaacacagtaatctactggtgtttcaaatatcagacgaactgaactttcccaatccgtcgttcttctcgaagttcttcaaacgtatgacggggatgacaccggcggaataccagaaacaaacctgacctcaaaacagctgtcctatacgggagcctgacggtccgtcgcaagagtccgcttccaatgccagcatcccttgtttggctgccagtccaccggcatagcctatcagcgtatggttgctgcccaccacacgatggcaggggatgagtatggagagggcatttgccccattggcagccgccaccgcgcgtacggctttcggattgcccagctttcgtgaaagctcgccgtaggacactgtttttccgtaagggatgttctgcaactcctgccacaccgtccgctggaattctgttccgactgcaagcagtggaacatcgaatatggtccgcttacaggcaaaatactcatccaactgaatgattgcccttgcaatcacttccgaagtgccttcctcataatcggcatgcagcgcctgccgtatacgcttatcaacgggtactctacgtttctcgttcagcatccagtcgcataggcagagtttatcgccgaaagagccgaggagcaactcgccataaggagattgatagtattgggtcaaaattgtttccatcgaacttagttttcagcaaagatagcaaattaaatcatcatttgtactccgcccacgacttgatagccaaatcatccggcatcatcgtgcagaatgcattgatgaacgcacttgccagacgggcattcgttatcaacggaatattgaggtcgatggcggcacggcgtatcttgtagccgttatccaactcgcctgcggtgaggttcttcggaatattgaccaccatgtctatctccttgcggtgcagcatgtcgagtgcctgcggctggcgttcgggttcgctgggccagtagacgcgcgtattctccacaccgttctccgtaaggaagttgctggaaccacccgtggcaaatatcttataccccttcttctgaagcatacgcgcggcagaaagcatgtccactttctgcttcggagtaccggtagaaagcaggatatttttctctggaatacgatatcccacggagagcatcgccttgagaatggcgcaggaagtatcgctgccgatgcaacccacctcgcccgtgcttgccatatccacacccagtaccgggtcggccttctgcagacggttgaaggagaactggctcgccttgatgcctacgtaatccaaatcgaacagattcttgtccggcttctgtaccggaatgccgagcatcaccttcgtggcaagttcaataaggtttatcttcagcaccttgctgacaaacgggaacgaacggctggcacggaggttgcactcaatcaccttgatgtcgttctcgcgtgccagatactggatattgaacggaccggagatgttcagctcacgggcaatctcgcggctgatgcgcttgatgcggcgcaccgtctccacatacaacttttgtggcgggaactggatagtggcgtcaccggaatgcactccggcaaactcgatatgctcactgatggcgtacgcgataatctctccatcttgcgccacagcatccatctccacctccttggcatgctcaatgaactggctcaccactacgggatgtttcttgctgacattcgccgccagcttcaggaagcgttccagctcctcccggttggaacagacgttcatcgcagcgccggacaatacgtaggaaggacggaccaataccgggaagcccaccttatccacaaaggcgttgatgtcctccagggaggtcagcgcccgccattcgggttggtctacaccaatgcggtcgagcatggcggagaacttgtcacggtcttcggcattgtcgatgctcctggcgcttgtgccgagaataggtaccttctgcgcatcgaggcgcagggcaaggttattcggtatctgaccaccggtagagacaatcaccccgtggggattctccagttcgagaatatccatcacgcgctcgaaggtgagctcgtcgaagtaaagacggtcgcacatgtcatagtccgtagacacggtttcggggttgtagtttatcatgacactgcggtagccttcctggcggatggtgttcagggcctgcacgccgcaccagtcgaactctacggaagaaccgatgcggtaggcgccggagcccaatacgacgatggacttgtggtcgccgaggtaacggacatcatttgccgtgccgctatacgttaggtagagatagttggtctgtgcgggatattcggcggcaagggtatctatctgcttcactacgggcagaatgcctgcactcttgcggaaattgcggacggcaaggatggcttcttcgccgtccattgcttgttccaagccgagggcacgggctatctggaaatcagagaagccttgtactttggctttacgcaacaagtccacgggaatcattggcaactctccatcagccataaaagagtgcagttccctgctggtatccatgatgttcatcaacttctccaggaaccaacggtctatcttggtcaattcgtgcacctggtccaccgtatacccggcacggaaggctttggagatgacaaagatacgtttgtcggtaggttcgcgcagagccttgtccaaatcggcaatcaccagttccttgttctctacgaagccgtgcatgccctggcctatcatgcgaagccccttctggatggcttcctcgaaagtacggccgatagccatcacctcgcctaccgacttcatgcttgaacccagctctttgtccaccccgtggaacttgcccaaatcccaacgcggtatcttgcagaccacatagtccagggcgggttcgaagaaagcgcttgtagtctttgtcacagagttgttcaagtcgaacaagccatagcccaagccgagttttgccgctacaaacgccaacggataacccgttgctttagaggcaagtgcagacgaacggctcaagcgtgcatttacctcgattacccggtagtcctcgctcatcgggtcgtaggcatactgcacgttacactctcccacaatgccgatgtgacggataatgcggatagcaagttcacgcaatttatgatagtccgtattgctcaacgtctgtgacggggcaataacgatggactcacctgtatggatgcccagggggtcgaagttctccatgttgcagaccgtgatgcagttgtcgaagcggtcgcgcaccacctcgtattccacttccttccatcccttcagcgatttctccaccagcacctgtggggagaaggagaaggctttctccaccagcacattcagctcttcttcattgtcgcaaaaacccgaacccagtccgccaagcgcatatgcagcacggacaatgaccgggtatcccagttcccgggctgcgcgacgggcatccgccgcattctccacggcttcgctcttgatggtcttcacatcaatctcattcagtttctgcacaaagatttcacggtcctccgtgtcaatgatggcctgcacgggagtgccgagaaccgtcacgccgtacttctcgaaaatcttgtctttatagagggagacaccgcagttcagtgccgtctgtccgccaaaagcaagcatgatgccgtccgggcgctccttctctatcaccttctccacgaagtaaggagtgacgggcaggaagtaaatctggtcggcaactccttccgaggtctgtaccgtggcaatgttcggattgatgagaaccgtgtagatgccttcctccttcaatgccttgagcgcctgcgaaccggagtagtcaaattctcctgcctcaccgattttcagtgcgccggaaccgagcagcaggactttctttatattgttttctttcatttgcatatctgtttattaaaaatgtaatagtagtaataaaaccttatctttctcttaccttacacaatcagtcactaattgaatggcattcagtataggactgaaaggtattcactctgggactgaatgacattcagtatgggactcattataccgtcttttacatactgattatcaagagattatgaacgcaatcattcttgataaaattctcttactaaagcaacttcacaaagtcatcaaaaagaaactccgtatccgtcggcccgctggcagcttcgggatgaaactgtgcggagaaccagggattgcgtttgtggcggattccttcattagaaccatcgttcatattgatgaaaagcggttcccagtcttctgtcagcgtgttgttgtctacggcatacccatgattctgtgaggtgatgaagcaacgttccgtacccaccatacgcaccggttggttatggctgcggtggccgtatttcaatttgtatatcttggcgcccccagctttggaaagcaactggtttcccatacagatgccgaagatgggcagtttctcgttctgcattgtcttgcggatatgctgcacggcagcatcgcaggtatcggggtcgccagggccgttggagatgaacaacccgtcgaactccatcccagtataatcatagtcccagggaacgcgaatcacttccacgtcacgtttcagcaggcagcggatgatgttatgcttgacgccgcaatccacaaggagcactttcttcttaccggttccttcgttgtaacggataacctccttgcagctaactttatccacataattcacatcggcataagaggcctcaggcatttcatccgattcatcatcaaaggcgatacgtcccatcatcaccccatgctcgcgaagcacctttgtcagttcgcgggtatcgatgcccgtgatgcccggaatctgttcgcgtttcagccagtcaccgaggctttccaccgcattccaatggctataattttcgctataatcgcttacaataatggcttcggcatggatatgctcgctctccataaaagtggcaagcccattcggttcgagagtaaaaggcggcacaccgtaattgcccaccaacggataggtgagcgtcatcagctgtccggcatacgaagggtcggtcaggctttcgggataacccgtcatggctgtgttgaagaccacctctcccgctaccggtttttcaaagccgaacgacttgccgtggaagcggctcccgtcgtcgaggattagagttacatttctcattgattcaattaaaattgataaacttgttctatataatcaataaatgccttgttcagcatcttcacaccgcccggcgtaggataatcgccgctgaagtaccagtcacccggatgcttggggcaggcctcatgcagcccttcgagaggctggtagacaatctgcactttggctttcgtccctttgggagtgagcagttccaccatcttggcagagatttcctcgtcggtaaagggagcgtatatctccttcacgtaattcaccatctgctctttgggcaggcctacctgctctttggacttgcggtaggcggcggcaatcacatcgcgcatctcacgctccttcagcagttccacagcagccttgaaggcgatgaattcgctcatcttagccatatcgatgccatagtagtcgggatagcgcacctgcggtgaagagcttacaatgactatcttcttcggctccagacggtcaaggataccgatgatgctctgcttcagggtggttccgcgcactatcgagtcgtcgatgatgaccagattatccactcccgggacaaggcttccgtaagtgatgtcgtacacatgggcggcaaggtcgttccggctgtttccttcggcaatgaaggtacgcagcttgatgtccttgatggccactttctcgctccgtatgcgccgcgacaagatatgctccaactcgtcgtggctgggactatgccccagggcggcaatctgctgtaccttctcctcgttgaggtagtcgtccaatccttgcagcattccgtaaaaagcaacttctgccgtattggggatgaaggaaaagacggtatggtccacatcgttgtcgatggctttcaatatgttgggcacgagtttctcacccagcagtttacgttcccggtaaatgtccacatcactgccccggctgaagtagatgcgctcgaaggaacaaggcttcacctcgcgcggcttgttgatttgcacggtgcgcaccttgccgcccttgttgataaacatggcttgtccgggttgcagctccttgatggattcgacaggaacattaagggctgtctgtatcacgggacgttcgctggcaagcaccgctatctcgtcgtcctgataccagaaggctgtacggatgccccatgggtcgcgtacggcaaaagtctctccgcttccggtaagtccgcacatcacgtatcccccgtcccactccttgctcgaagtgcgcagcacgttggcaaggtcgatgtggttttctatataacgggtgatgtccatgcctgccagcccttccgcttcggcaaggttgaagaggcgctccacttcgcggtcgaggcgatgtcccaactgctccagcatgatgtaggtatcggcatatttgcgcggatgctggccgatggcggtaatgcgtgcgaagatttcatccacattcgtcatgttgaagttgccgcagagggcaagattcttggcacgccagttgtttctccggaggaacgggtgcacgtacgagatgccggactttccggtagtggagtaacgcaggtgtcccatatagacctcccctgcaaagggcagcacacgcttggcatagtccgcatcatgcagctgttccttggtcaagtccttgaagtgaccctgcaccgtaccgaaaatttcggtaatggcgcccgagccgagagcacgctcacggaacatatattcctcgccgggactggcttccagtttcacgcaggccagtccggcaccttcctgcccacggttgtgttgtttctccatcaggagatagagcttgttgagtccgtacatccatgttccgtacttctcttcatagtactccagcggtttcagcaggcgtatcatggcgacgccgcattcatgcttcagttgttccatctatctatttacaatttaccatttacaatgtacaattttaagtgtacaattttcttttccttattatagcatacaattaccatttacatttacccctcccaagcgcagccccattgtacattgtaaatggtaaattgtacatgtcctcattctacagtcaccgacttcgcaagattcctcggctggtccacatccattcccttgcacacggcaatgtgataggcaagtaattgcagaggtaccgtagttattaacggatcaaggcactccattgtttcgggaagctcgatgcaagtgtcggctattttactgatgaccgtatctccctttgtcacaatggcgataaccctgcctttacgcgcctttatttcctggatattgctcagcaccttttcataaagcccattccgggtggcaatgaccactaccggcatttcggcatccaccagggcaatggggccgtgcttcatttcggcggcaggatagccctcggcatggatatacgaaatctccttcaacttcaaggcgccttccaaggctacgggataactgtatccgcgtcccagatagataaagttgtgtgcataggtgaatatcttggaaagttccgctatacggtcgttcagtttcaagacctccttcatcttgtcggggatatgtcccaattccttgacaattgccaggtattgcccttcgtccatcgtctttttctctttggcaagtgtcagggccagcatggtaagcaccgttacctgcccggtgaaggctttggtggatgccacccctatttccggtcccacgtggatataggaacccgtgtgcgtggcacggggaatgctggaaccgacggcattgcagatgccgtatataaatgccccacggtttctggcaagctccacggcagccagcgtatcggccgtttcaccgctttgcgagatggcaatcaccacatcgttgctgtcaatcaccgggtcgcggtaacggaactcactggcatactccacctccaccggaatacggcagaagctttcaatcaaatgcttgccgatgagggcggcatgccatgacgtaccgcatgccacgatgacgaagcgtttggccgccagcagacgttccttataatcaatcactgcagaaagaaccacgttcgtaccctccacattgatacgcccgcgcatgcagtcgtgaatgcagccgggctgttcgaagatttccttcagcatgaagtgcggataaccgcccttctccagctggccgagattgagcgctaccgtctttacctcgtgcggacattccacattcttcaggttaacaaccttcagcttctctccccgacggatgagggcaatctcttcgtcttccagatacaccaccttatccgtgtattccacaatcggcgtggcatccgaagccaggaaaaactctccttcaccgatgcccaccaccagcggactgctcttgcgtgcagcgattatcccatccggattgtccttgtcgagcaccgcaatggcatacgccccaatcacttcctgcaaggcaagttgcaccgccgtcagcaggtcaatatggtttgtcacctgaatgtattcaatgagctgtaccagcacctcggtatcagtgctgcttttaaatacataacctttggcttgaagtttttctttaaggacggcgtagttttcaataatgccgttatggatgagggcgaggcgttcggaagaggaataatggggatgggcattgacggaacaaggttctccatgagtggcccaacgtgtatgtgcaataccaatgctaccggaaatatctttttgagcaacgaaagtttcaagttccgaaaccttacctttcgctttgtacacgttcaactgtcggttatcactgattaatgctacccccgcactatcatatccacggtactccaaccgcttcagacccttgataagaatggggtaggctttcctttgacctatatagcctactattccacacataatgtatcagtatttgattttgcgttgcaaatatacatattcttaagaacataaagttaatctttccactatttatttatcaaaagaatagaaaaaagttgtttttacatcaaaaagttaaagaaagtattattttaaaagcaaaaggcttaatttataaatccaaatcaaaccgtctgattttgatttaggattaaaagaaaacagagggtgttttctatcaattcataacttcatcttctatcgcaggaattttgcaagaaagaaggcaggaatacatattagcattttgcaattaataccatatatttgccgaacattttgaaaccacaaacaatattatacagcaataaagaaagcttataatcatgaaacaagaactttttaacaacaaaacaaaagcagaggattaccagcgacagcccaaacagttgggcttgtatgaggcatcccatgagcacgatgcctgcggagtaggcatgctggtcaatatccagggaggaaaatcacatgaactggtagaatcggcattgaaggtactggaaaacatgcgccaccgtggagcggaaggggcggacaacaaaaccggagacggtgccggcatcatgctgcagataccgcacgaattcattctgttgcagggcattcccgttcccgagaaaggaaaatacggcaccggcctgcttttccttcccaaagacggaaaagaccaggctgtcatcttgagcgtcattatcgaagagattgaaaaggagggattgaccctgatgcatctgcgcaacgtgcccacttgccccgaaatattgggagaagcggctcttgccaacgaaccggacatcaagcaaattttcatcaccggatttacggaaagcgaaaccgccgaccgcaaactctatataataaggaaaaggatagagaacagaatacgcaagtcggacatccccacccgcgaggatttctacatcgtctcgctctctacgaagaacatcgtctacaagggcatgctctcttccttgcagttgcgcaactacttccccgacctcaccaacagctacttcaccagcggactggcattggtgcactcccgtttcagcaccaacactttccccacctggggactggcacagcctttccgcctgctggcacacaacggcgaaatcaataccatccgcggcaaccgcggctggatggaagcccgtgagagtgtactctcctctcccgccctgggagacatccgggagatacgccccatcgtgcaaccgggcatgagcgacagtgcctcgctggacaatgtgctcgagtttctcatcatgtcgggcctgagcctgccgcacgccatggccatgctcgtgccggaatctttcaacgaaaagaatcccatcagcgaagacctgaaagctttctatgaataccactccatcctgatggagccgtgggacggaccggcggcactgcttttcagcgacgggcgctatgcaggcggcatgctcgacaggaacggactgcgccctgcacgctacctgattacgcagggcggcatgatggtagtggccagcgaagtcggcgtgatggatttcgagccgggagacatcaaggaaaaaggacgcctgcaaccgggcaagatactgcttatagacaccgagaaaggcgaaatatattatgacggcgaactgaagaaacaacttgccgaagccaaaccataccgcacttggctggccggcaaccgcatcgagctggacgaactgaaaagcggtcgcaaagtctcccatagcgtggagaactacgacagcatgctgcgcatcttcggctactccaaagaagacgtggaacggctgattgtcccgatgtgtaccaccggtgccgaacccatcaactccatgggcaatgacaccccgctggcagtactctcggacaaggcgcaactactgtacaactatttccgccagcagtttgcccaagtcaccaaccctcctatcgacccgatacgcgaagaactggtaatgtcgctgaccgaatacatcggagccgtaggcatgaacatactgacacccagcgaaaaccattgcaagatggtgaggttgaaccatcccatcctgaacaacgcccagctggatattctctgcaacatccggtacaaaggcttcaagaccgtgaaactgcccctgctcttcgaagtggcaaaagggtgccagggattgcagcaagcattggcaaccctctgcaagcaggcggaagaatccgtcaacgaaggagtgaactacatcgtgctttccgaccgcgacgtagacgccgcccatgccgccattccgtcactgcttgccgtgtcggcggtacaccaccatcttatctccgtgggcaaacgggtgcagacggcactgattgtagaaagcggcgaaatccgcgaagtgatgcacgccgcactgctgctgggcttcggagccagcgcactgaatccgtatatggcttttgccgtcatcgacaaactggtgaacgaaaaggaaatacagctcgactacgccactgccgaaaagaaatatatcaagtccgtctgcaaaggcttgttcaagattatgagcaagatgggcatcagcaccatccgttcttaccggggcgcgaaaattttcgaggccgtaggactgagcgaggagttgagcaatgcctactttggcggactgagttcacgcatcggaggcatacgcctggatgaagtggcacgcgacgccatcgccttccacaaggaagggatggaggttcttaaaaagaagggggaagcggagctattgccgaaccgcggactgtatgccttccgcaaggatggtgagaagcacgcctggaacccggaaaccatcagcacactgcaacttgccacacgcctgggaagctataagaaattcaaggagttcactgccatggtagacagcaaggaatctcccatcttcctgcgcgatttcctcgacttccgccgcgctcctatcagcatagaccgggtggaaccggtagagaacatcgtacagcgctttgtcaccggcgccatgtcctacggctccatcagccgcgaagtccacgaagccatggctattgccatgaacaagctgcatggccggagcaatacgggcgaaggaggcgaagaccgggcacgcttcatgccgcgcgaagacggcaccagtctgcgcagcgccatcaagcaggtggcctcaggacgtttcggtgtcaccgctgaatatctggtgaatgcggacgaaatacagataaagattgcccaaggcgccaagccgggcgaaggcggacagctgccgggcttcaaagtggatgaagtgattgccaagacacgccactccattccgggcatctcgctgatttcccccccgccccaccacgacatttactccatcgaagacctggcacagctcatcttcgacctgaagaacgtgaacccacgggcaaaaatcagcgtgaagctggtggcagaaagcggtgtgggcaccattgccgccggtgtggcaaaggcaaaggccgatttgatagtcatctcgggtgcagagggcggtacgggagcctctcctgcatcatccatccgctatgccggcatctcgcccgaactcggtttgagcgaaacgcagcagacactggtgctgaacggcctgcgcggacaagtgatgctgcaagtggacggacagctcaaaacaggccgcgacatcatactgatggcaatgctcggagccgaagaattcggtttcgccaccagtgccctgattgtactgggttgcgtaatgatgcgcaaatgtcaccagaacacctgccccgtaggggtggcgacacagaacgaagaactgcgcaaacgcttccgcggacgcagcgagtatctggtgaacttcttcacgttcctggcgcaggaagtacgcgaatacctggcggaaatcggtgtggaacgcctggatgacatcattggacgcacagaccttatcgtccgcaagccggatgacggaatcaggaaacatcagttgataagcttcgacaaactactggcacgcgtagacaacgaagccgccatccgccacgtcaccgaccaacagcatggcatcgaccatgtgaaagatgtagagatgctacatgccgccgccgaagccgtagagaaccagaaggaaatctcgctggagtacaccatcgccaataccgaccgtgcctgcggcgccatgctctctggtgtcattgccgcaaaatacggagaaaaagggctgcccgaacatacgctgaacgtgaagttcaaaggctccgccgggcagagtttcggggcattccttgtcccgggtgtcaacttcaagctggaaggcgaggccaacgattatctgggcaaaggtctgagtggcggacgcatcgccgtcctgcccccggtacggagcaacttcgaggcggagaaaaacacgattgcaggcaacaccctgctttatggcgccacaagcggtgaagtttacatcaacggccgtgcaggcgagcgctttgccgtccgcaactccggtgccacagccgtagtggagggtgtaggtgaccactgctgcgagtatatgaccggcgggcgcgtggtagtactcggacagacgggacgcaactttgccgcaggcatgtccggcggtgtggcctacgtatggaaccgggacggcaacttcgactatttctgcaatatggaaatggtggaactgagcctcatcgaagaggcctcctaccgcaaggaactgcacgagctcatctgccagcactacctgtacaccggttccaaactggcacgcaccatgctcgatgactggccacgctatgccgaccagttcatccaggtagtccctatcgaatacaaaaaagtgctgcaagaggagcagatgcagaaattgcaacagaagattgcagaaatgcaacgcgattattgaatcgcgaattaataatgaaagaatgaaagactgaggaaattcccctttcattctttaattctttaactttttaatttgttcatcatgggagatccaaaagcattcctcaatatcccccgccaagaggcgggttaccgtccgatacacgaacgtatcacagacttcagccaagtggaacagacactgaacagccacgaccgcaagctccaggcctcgcgctgtatggactgcggcgtacccttctgccactgggcatgtccgctgggcaataaagacccggaattccaagacgcgctctaccggggcaaatggcacgaagcctatcaaatactgaacagtacgaatgattttccggaatttacgggacgcatctgccctgccctttgcgagaagtcgtgcgtactgaaactctcgtgcaacgaaccggtcactatccgcgagaacgaagccgccattgccgaggctgcttttcgcgagggctacatcacccccctccagcccgaacgcaacggaaagaaagtagccgtcatcggcgccggccctgccggattgagcgttgccgtacggctgaacgccaaaggttacgaagttaccctattcgacagcaaaccgatgccgggaggactgctgcgctatggtatccccaacttcaagctggacaaagccgtcatcgaccgccgcatgaaaatcctcgaggccgaaggtatcttgttcaagatgggagtccatgtcgatgtgcagaaactgcccgccggattcgatgcctacgccatttgtaccggtacgcccaccgcccgcgacctctccattccgggcagggagctgaaaggcatctactttgccctcgacatgctggcacagcagaaccatattctggatggagataccttcccgaaagaccaactcgtcaacgcccgcagcaaacgggtactcgtcatcggcggcggcgataccgggtccgactgcataggcaccagcatccgacagggagccgtcagcgtaacccagattgaaatcatgctccaaccgcccataggacacaacccagatactccctggccgcaatggcccgtcgtactgaaaaccaccagcagccacgaagaaggctgtacccgtcgatggtccctcgcctctacccggttcatcgggaagaatggcaaggtatgcggtgtggaagtggaagaagtggagtggcttccggcaacagacggtaaccgccctaccatgaaatctacgggtaagaaagaggtcatcgaagccgatatggtgcttcttgccatgggtttcctcaagcccgagcaaccgaagtttgcagagaacgtattcgtggcaggcgatgccgcccacggcgccagcctcgtggtacgtgccttggccgacggacgacgagtggcaacagaaatagatcgttacctcgaacctctaaaagaaaacaagaaatgatttccctttctttaatttttaacctttaatttttaattctcatgtgtggaatagcaggaatcttcaacatacagtctcaaactcctgagttgagaaacaaagcgctacggatggcgcagaaaatccgtcatcgcggaccggactggagtggtatctacgtaggcggatccgccatcctcgcccacgaacgcctctccattgtcgacccggaatccggtggacaacccttatattcacccgaccgcaaacaggtgcttgccgtcaatggcgagatttacaaccatcgcgacatccgtgcccgctatgccggaaaatacgccttccagacaggttccgactgcgaagtcatccttgccctttacaaagacaaaggcatccgcttcctcgaagagctgaacggcatcttcgccttcgccctctatgatgaagaaacggacgattacctcatcgctcgcgaccccatcggcgtaatccccctttatataggacgcgacaaagacggacacatctacttcggcagtgagctgaaagctcttgagggtttctgcgacgagtatgagcctttccttcccggccactactaccgtgggcgcgagggcaagatgcaccgctggtacacccgcgactggatggactatgccgctgtgaaggacaactacactcctgccgccgaacgtaatgccgcgccggcttcgataggccggacagcctacagcacacaagtcacggctgtgcacgacgcacttgaagccgccgtacagcgccagttgatgtccgacgtcccctacggtgtcctgctcagtggcggactcgattcttccgtcatctctgccatcgccaagaaatatgccgccaaacgcatcgagacagacaacaaggcagatgcctggtggccacagctccattccttcgccgtcggcttgaagggtgctcccgacttgattaaagcccgcgaagtggcccgtcatatcggtaccgtgcatcacgagataaactataccgttcaagaaggcctcgatgctgtccgcgacgtcatctatttcattgagacttacgacataaccactgtccgcgcctccacccccatgtatctgctggcgcgtgtcatcaaaagcatgggcatcaagatggtactcagcggcgaaggtgcagacgaggtgttcggcggttacctttacttccacaaggcgcccacaccgcaagcctttcatgaagaaaccgtgcgcaagctctccaaactacatctgtacgactgcctccgtgccaacaaaagccttgcagcctggggagtggaaggacgtgtccccttcctcgacaaagaattcctggatgttgccatgcgcatcaatccggcagtcaagatgtgccccggcaaggagatagaaaagaaagtagtccgcgaagcctttgccgacatgctccctcagagcgttgcctggcggcagaaagaacagttctccgacggtgtgggctacagttggattgatacgctgaaagccgtcactgccgctgccgtcagcgacgaacagatggcacatgccgccgaacgcttcccgatacataccccgcaaaataaggaagagtattactaccgtaccatcttcgaagagcatttccccagtgaaagcgcagcccggagtgttcccagcgtacccagtgtggcatgctccaccgccgaagcgctggcatgggacgcctctttccaaggaaagaacgaccccagcggacgagcagtagcgggggtacacgaagaagcatacaaggattaaaaaaagagctgccgacagatttcctgccagcagctcttctcattttttatttatcaaatcctatcggactaaaacatcattgtctgtccgccaatcacacctgccacagcactcgctacggcaataataagtttcaaaatcacattccacgttttcttcataaagattatccattatctgattaataattcatagctactgttatcccagtggattctcaccttggtctccatccgaatccgagcctcctccttccgaaccggagccgccatctgtagaagtcttccccttaagataatcatccaaactcaccaaatccagcctttctccagcacgggtagcagccttcgatatcttcagttccctattcgcctgaaaacagatacggacgctctccacactcttggctgtcacgtcatcagccttttcctcacctttcgatttggctgccagtataaagacacccagcccggctatattaaccgtctttccttccagcaactgctctttcagcttttccacaaagttctgcatcgtactcttgatgtcaccgatagacagagaagagcggtcctgcatcttctgtgcaataaacgccaaatccacgctttgccccaatgtcaccaactgcggataatacttcttgggagagttttcaaccctggggtccgacggtctctccaccgtcctgaaaattacactcatactttttttctttagagatttaaattcgttttcctattcacacgtttcgttgatcaacgatgcaaaggtgaggattaaaaactatgtagccaaagaaaaaaggtgcttgggagtagtttttctgagaaaagtgataaagtattaattataagataccttatttaatcacgtttaaaaatatccctcgtatagactttgtcagccacatcatccaaacatgcgtcatagcggttggcaataatggcctgcgagatacgtttaaactcctccaagtcattcacaataagcgaaccgaagaaagtactgccatcttccaatgtaggttcataaatcaccagcttggcacctttagccttgatacgtttcatcaccccttgaatggaactctggcggaaattatccgaatttgacttcatggtcaaccggaatacaccaatggtcacctccttttctttctccgcatcatatacactgttacttccgtatgcaccggcaatgtgcagcaccctatcggctataaagtccttacgcgtacgattactctccacaattgccgacatcatattctgaggcacatcgttatagttggcaagcaactgtttggtatccttgggaagacaatacccaccataaccgaaagagggattattataatgtgtaccgatacggggatccagacctacaccattgattatggcttgcgcatccagccccttcatctcggcatatgtatccagttcattaaaatacgacacacgcagtgccagataagtattggcaaaaagcttcactgcctctgcctctttcatgcccatgaagagcgtgtcgatgttctctttcaatgcaccctcatgcagcagccgggcaaatatacgtgcaagttcttccgcctcaggatttccgatggcacgaactgccgcattctcttccgctgacacccggccttccaaatcaatcatcttcggatagccaacgataatacgcgaaggatacaagttatcataaagagctttactctctcttagaaactccggagagaaaagcaggttaaatttctttcctttcaattccgatttatactggaacattggggcatacttcacataaagcgaacggcaataccccacaggaatggttgatttaatcaccatcacggcatccggattaacctcaagaacaaggtctatcacatcttctatatgatgcgtatcgaaaaagtttttctgaggatcataattggtaggtgctgctattactacaaagtcagcctccttgtaggcagacctgccatccagcgtagctgtcagattgagttccttttccgaaagatacttctcgatatattcatcttgaataggcgacttcttattattaatcagttccaccttttcaggtaccacatccacagcagtcactttatgatgttgtgccagcagtgtcgcaatagacagtcctacatatccggtaccggctacagcaatccgcagtttctcaaaatctttcatgtcagttcaattgggttatataaatcaatgatggattatttcatataaaagtccttataccattcagcaaaatttctgaggccttcccgaagcgaagtattcggtttgaaaccgaaatcccgtcccaaagcagtagtatccgcataagtcacaggcacatcacccggttgcatcggtactaattccttatgtgcctcgaagtcatagtcggcaggcaatacacctgcccttatcagttcctcctgcaatatttggacaaaatccagtaagttctcaggatgattattgcctatattataaactttataaggcggtataggcagaccatcttcacccatcctacgttcaggagcttttgccatcacacgcatcacgccttctacgatgtcatccacatacgtaaagtcgcgcttacagttcccataattaaatatcttgattttctcacctttcagcaacttatcggtaaaaccaaagtaagccatatccggacgacctgcaggaccatataccgtaaagaaacggagacctgtggacggaatgtcataaagtttagagtaagcatgtgccatcagttcattacttttttttgtagcagcatagaggctcacgggattatccaccttgtcatcggtagaataaggcacctttttgttcgagccatacacgctcgacgaagaagcatagaccaagtgtttcaccccctccctgccctcatcatacgaatggcggcaggcttccaatatattataaaagccaatcagattgctttcgatataggcacccggattcgtgatgctataacgcacccccgcctgtgctgccaaattcacaacaatttgcggctgatactcatcaaacagcttgtcgacaagtgctttgtcggctatgtttcctttgacaaagacaaatctgtttccaaacttcgtcaattgctccaaccgccattgcttgatgttcacatcataataggtattcaaattgtccaaacccactacaagggtatcgagctgttcctccagcaggcgcatacagagattgctgccgataaaaccggcagctccagttactaatacgttcatggttatgattgatggattaatgcgctttgcgcaactacacttagagaatggcttcctttatcttttcaacgatgtatttcacatcttcatctgtcacccacggacctgctggcaaacaaaaacctaccttaaagatttcctcctccactccgttggtgtaaaccactgcatctgcatatacaggctgcttgtgcatgggcttccacaccggacgggtttcaatccggtttgccgccataaacacacgcaatgcctccacgttgtcattgggctgacagtctgtcgtggcactctccacagcttttatcacaccggcagcaccgcctacggctgtttttatcacctctttataggcattctcctgaccttgtaccctcacattggcatccagcgtagccgtacagagccagtaattagagtcataacacgaatcggcaggttgccgatggatatgcacgcccctcacctctttcaacagttcctcataaagagcctgcacatgcttgtgatggtcgatatgttcctgtaccaccgtcatctgtccgcgaccgatacctgcacaaatattactcatacgatagttgtagccaatggccgtatgctgatagtaaggataagcatcacgcgcctgcgtggcataccacatgacggtattcttgtcctccacgctctgacaaaccaaggcgccaccacccgaagtcgtaatcatcttgttcccgttgaaactcaacacaccgaacttaccgaaagtgcccaatatccgtccgtcaaacttagagccaaagccctcggcagcatcctccactaccggaatatcgtaacggtcggcaatttccataatccgtttgcaatcgtaaggcataccgtagagagccaccggaacaatcgcctttggcttctttcctatcttggcgatacggtcttttatcgcctcctccagcagcacagggtccatattccaagtttccggctcagaacccacaaacacaggcttggcacccagataagtgataggatgcgaagaggcacagaaagtaaagctctgtaccagcacttcatctcccggaccgacaccgcaagctatcaatgccaaatgtactgctgccgtacccgcactcagtgccaccacttcatgtgtgccgcccgtaaactgtttcaaatcctcctcaaaagcatttacattaggtcccaaaggtactacccaattggtatcaaatgcctccttcacatatttctgttccaatccggctttgctcatgtgggcgaggcagagataaatttgcttgtccataagatatatatatatgatttacaaaactatattcttgattactttacatcggtttcctaccgctaaaaccccatccggaatatcctttgtgacaactgaaccagcacctacaatactccatttcccaatctttactccaggaatgactacactaccggcaccaatccatgtcccctcacccacttgtacattaccgcaaagtgtacaatgaggagaaatatgtacataatccccaagcctacattcatgatctaccgaagcacctgtattaatgatacaatgactcccaatacgacaatctgactgaacgatagccccctgcattacaacagtaccttcttttatcacagccttttccgaaataattgccgaaggatgaaaaccccggccatattccacttgtagcttttctgctatctttctacgaacaccattattcccgatactgattatcaacggaccacagacttccgacgaacgtaatacgggatagtcaaaaagagtatggattttttcattatcatcaaacaatgcttcaatcggttcattattcgcacgcaatatatcaatgatcactttggcatgaccactggcaccatataaatacattttccaatattaattatttccagtaaaagcctccatcgtaaccgaagtttccgaactaataccttcgcgtacaaagaccttctttattgtcataaaaatgattttcaaatcaagtaaaaaagagcaatgatccacgtaccacacatctagttcaaacttccgtgtccaactgatggcattgcgaccgttcacttgtgcccagcccgtaatccccggacggacttcatgacgacgcgcctgttccttgctgtataacggcagatattggggaagcaaaggacgagggcctatcagggccatatcccctttcaatacatttatcagttggggaagttcatctatcgaagtggaacgtacaaagcgtcctactttagtcaaacgctgagcatccggaagcagatttccatccacatcccgctcatccgtcatagtcttaaacttgattactttgaatatctttccgttctttcccggacgttcctgcatgaaaaatacgcctgcacctttgttggcaaagtacagccaaagtgtaatgataagtaaaggagcaaacaatacgcctaaagcgataaagattacacaaaagtctgtaactcgtttaaaaagttttttgtacataagctattacaactagctaccaatactatctatagcttctaaataagcctttactataacctcaaatccgcaactacgcgcctaatatgatacagaagcgaaaagaatctgcatcgttagtaaaaagggggcacagtgcatcgaatgtcaccataaagacatataaatgccccttaccccaccatgcgacttgaggcaatacgcaaaatcacgactataagttgtcggtgttatccaaagtcattctggaacacattggcataagcattgttgcatgaatagatattcagcacatacttccttgatgtcctgacccatttggctggcacagagatgaacttaaagacaaacgtcttgatgcggcttgttgctttgagtccgaacctcttcacgtcaagcctcgccatgatgaatttatagaagttgcgtatgagtgccataagcagaagaaacaccgtgttttctcccataaaggattttggaagcctgttccagccgaatccgttattcatatcatcgaagatgcgttccttccctccacggaggttatagaattcgacaatctctttctcggaagactcgtagtcatttgtaaggatgcagcggtaggtgtattctccttcccacaggtcgagttcgccgtctatccgcttctgtctttgaatcacaagacggtatgccttccctttccatttctcgatgagaatggaggccagctcaaactcaatgccgcccaattccactttcttccaacctctgagggcaaagatgtcattgtagagcgaactgcatcggttagcacggatatagaaggtcttgcagtgtttagcaatctcttccactatctcttcagaacacgagccgcaatcagctctgaaacggttgataataagcttgttttgttcaaacctttcaaagaacctcttcagcgtgtccttctggtggaaacggacatttgtgttgccgtcgctgttctcaatgccgacaatcaagttgccaataaccgccacgccagggcgataaccaaggaacttcttgtatgtaggcttcgcatcaaacttctcagcctctatgaactggtggtcgaagtcaacgtcatacccctcgccctctttcagctgccctgtggacaataggcaattgaggagcagtgtattcagcttgtctgccgtgttgaagtcgtaggtcttgccagtgtcggatgtgtaggaaatgttatcctgggtcagttcctttatggctctaagaatcgtgtcggcactgcatgtgcgaagtgtcggatgaagcgaaaggtggtacatcagatgagtggtgacatcctcgatgcatgagccgccacaaaaataaacgctcataagcgaacggatgatttcgctgtattgataaccatacagcctgcatctcataccgagggttgagtcgattacagatgagagtctggagtcaaattgctccattattgaaaatattcctccaaaaggagtgagtttctcggatttaattgctacctttgccatgtctgtcgggtttgatacatattttgatttgcaacactaagataggtgaaaaatctgacatggcaaattcctgagcaactttttgttgctcaggtacttaaaaagttatatttgtaatagtgttgcggaattaaggcaatataaaaatacccctgcttggcaatgcccggcaggggatttttcgtagatttgattcccgtcttgaccggtgggataaaatcatttctactatgacaacaaagatagcaaacatcctccaatgttacgcattggggatggggataaagcagataagcaggagctttgagctttcccgcaacacggtgcgcagatatgtgcgcctgtttcaagagtgtggtataccgataaaggagttggccgccatgccttccgctcgcatccaggaaatgttctctgaaggtgttggccgtaacagggaaccgtcacaacgccagcttgagcttgaggcactccttcctgagtatgctgcccggcttagccgccgaggcgtaacagtgaaaaccctgtacgaagagtaccgcgagacccatcctgacggatacagacatgccagtttcggcaactatctcatgcgttaccgtatggtgacacatgtcgtaggccatgtcgagcattatgccggagaccagatgtatatcgacttcgccggtgacaaactggaagtcgttgacagtgaaagcggtgaatgtcgcagcgttgaagtgttcgtggccatacttccgtgcagccactatacctattgtgaggcggtctggtcccagtcaaggcaggacttgattaaggcgtgtgagaacgcgcttcatttttacggcggggttccgatggcgatcgtaccagacaacctcaaatcggcggtaacccgcagcgaccgtaacgagccggtaatcaacgaggagtttgcggcatttgccgaacactacggatgtaccgtataccccacacgggtacgtcatccaaaggacaaggccttggtggagaatgccgtgaagctactttaccgatccgtctacgctgacatcgagggtcttgtattccactcgctggagtctctgaatgcggccatatccgaatcgctctcggccttcaacggacgcaggatgagcgggcgtccccagtccagacgggaacagttcgagcagattgagtccgactgcctccgcccgcttcccgccatacgccatcagatgaaagagcgacgctccgcaacagtaatgcgtaacggctatgtcaccttcaggcttcaccattacagcgtaccgaaagagtatataggcaaacgtgtcgagattgtctatgatgcggacacgctggaaatatatcatggcctgcgtctggtgaccacacaccagcgcgatgacacgccatactcctatacgaccaaggatgcccacggactgcccggacgtcatggaagttatgaaaaggatctggaacagatttacgaacgagccggccagacagataacgtcctgctgctgtatctgcgcaaggtggcggaactcaagaagtatcctcccgcggcgttccgttcatgcagaggcatcatggcgttggagaagaccttcgggctggaacggttggtggcggcaagcgcatgcgccacgcaactgcgcctatacggatatcaggagataaggcggatccttgaacgcggggatgatgcagacttcctgtcaaaagacgacattgacgatgaggtccccgtaacatctatccacaaaaacatccgcggagcagcctacttcgcacaattaaaacatttaaatagagacaacaatggaaacaaataatcttaccgcaccgatagctgtcgaaaaagaccgcaacacgttgacaatcgaactgatgaaccgtatgaagctgcacggcatggccgccgccttcactgaaagcctaacctccactatggcagaaacaatgacaatcgaatctttcctgcacatgttacttgccagggaatgggactaccgtgccaatgcagccatccaacgccttatacgcggggcggcgttccgctacaaggcctgcctcgagcagatagactatgcaatcccgcgtggccttgaccgcaatcagatggagcggcttgcatcgctggagttcatccgcaagggacagaacctcttcatcacagggtcatccggtaccgggaagagcttccttgccacagcaatggggtatgaagcctgcaagaagggcatacggacatattatgcgaatgctccgaaacttatgggtacgcttaaggtggcaaaagtaaaaggcacactggaatcggaactcaagagaatcgaacggagcacgctgctcatattggatgacctcttccttgtgaaccttgatgccaaggaacgacccatcctgctcgatataatagaggaccgacatgggcgcaagtccatcatcatcacctcgcaactgccaacggacaattggtatgatgcaatcggagaccctacagtagcagatgccattatggatcgtattatacatacggcgcaccggattgagctgacaggagaaagtgtccgtaaaatggctgcatacagagggaaataaactaaaataataataaccccatcggtcaagactttttaagggggcattgttgaatgttttaagggggcagaatcgcctggttttagggggcagcttacactggattttccacatttaggtttcggtttatttttctgaaagtcccaaaacttgggatttacagatattcccaaactctgatatttcttctttccgtctttactgatacgaagcattagagggtgttcgccattagatagggtcttggatttgtaacaaaccactgaaattgtagcatccatgttcatttttggtttaactctcggtttaactcactcggttaaaccaaaggtaaaccaccccattcaagcaacaaaaaaggagctacattttactgtaactccttgattcttatcagtcggggtagcgggattcgaacccacgaccccctgctcccaaagcaggtgcgctaaccggactgcgctacaccccgaatactttacttctgaaaagcgagtgcaaaggtaaaaacaattctgataccaaccaaacatttaggcaagttttatgcaattaaaattacattttcagatagaaatctttcgttaaagctacatattcaggggtaaactcattgtgattcacctcaatacagagtttctcttctctacactcttttgcttcaaaaccaaagttcagcaatacccgtctgcacggttttccgggcttggtgaagacttgcacacgatgcaatggaaacaacttatggttccaagctgtatccacaaccgttttttcagcttccgctggaataatgatgcttacgactccttgctcttcaagcaaagatgccgaacgatgaaacagtaaatcgtaattcaaattgcccgcatgccgtgctgtgcacctttgttcgtcaggacatttcaacgcatctataaaatagggaggattggaaacgatgaggtcaaatctgttttccggctgataatctcggaaatcatgacatatgacctctactctatcggcccatggagagtgagatacattttctgtggcttgtccggctgcagccgcatctatctcgattgcagtaatccgggcatgcggattcctttgcgctaactgtaaggctattaatccggtaccggttccaacgtccagtatacgctttgctttgtctgccgaggcccatgccccaagtagtacaccatctgtgccgaccttcatggcgcatttatcatgaaatatggtaaattgtttaaacttaaaagatgattttggcatgtttatcttctttaattgggctcaaaaataatcaaagcctgcatatttgtcataaaattggcactgtttttgtctttttaaagggtgaagaacgtttatttatgaagaaatagcttaactttgcaggcgctttattggcctgccaatatgacataaactaaaaagaaagaaatgaagaaaagaaattacctgagtgatgtcgaagatagaagcggaaacgctttctctgtaattgctgattttgaggggaatgaagaacaattgatggacattgaggtagaagaggttttaccgatattgcctctccgaaatatggtattgttccctggggtgtttatgccggtatctgtaggaagaaaatcttccctcaaattggtgcgtgaagcagaaaagaaaaattcttatatagctgttgtatgccaaaaggtggctgaaacagagacacctctgtttgaggatttacataccatcggtacagttgccaagatagtacgtgtgcttgaaatgccagaccagacgactacagtcattctgcaaggctccaaacgtatggaactgaaggagattacggatacgactccttatctgaagggacggatagctacgctgaatgaagaacttccggagaagaatgacaaggaattccatgcattggtagaggcgtgtaaagacttgacagtacgctacatcaagtcatccgatatgtttccgcaggattcggcatttgccatcaagaacattaccaatccaatgtttttggtagactttatctgtacgaacctgccactcaagaaagacgaaaagatagaactgctccgtatcgactctttgcgggcgcgtacctaccgcctgcttgagattctgaatcgtgaagtgcagcttgccgaaatcaaagagtctatccagatgcgtgcacgtgaggatatagaccagcagcagcgtgagtatttcctgcagcagcagattaaaaccattcaggatgagctgggtggcggcggtcaagagcaggaaatagaggagatgcgtaagaaggcggagaccatcaaatggaatgatgaggtgaaggctacgttcctgaaagaggtggataagttggaacgtacccatccccagtctcccgactatagcgtgcagctgaactatctgcagacgatgcttagtttgccgtggggcatttatacgacggataatctgagccttgtcaatgcagaaaagacactgaacaaagaccattatggtttggagaaggtgaaggaacgcattctggaacatcttgctgtattaaagctgaagggcgatatgaagtcccccatcatctgcctgtatggccctccgggtgtgggaaaaacctctttggggcgttccattgctgcagccttgaagcgtaagtatatccgtatgtcgctgggaggcgtgcatgatgaagctgagattcgtggtcatcgtaaaacctatatcggtgccatgccgggacggattatcaagaatctgataaaggcaggctcctccaatccggtatttattctggatgaaatagacaaggtgagtgccgaccgccagggagacccctcctctgccctcctcgaagtgctcgacccggaacagaatactacattccatgataactttctggatgtggactatgatttgtccaaagtgatgttcatcgctactgccaataatctgaataccatccccggaccgttgctggaccgtatggagctgattgaggtaagcggctatatcacggaagaaaagattgagattgcccgccgccatctggttccgaaggaattggaggcaaacggtatgaaaaagaatgatatcaagattccgaagaacacactggaagccattatagagaattatacccgtgagagcggcgtgcgcgaactggaaaagaaaatcggaaagatactccgtaaatctgcacgccaatatgctacggacggttattttgcgaagaccgaaataaaaccgggagacttgtatgaattcctgggtgcacccgaatatacccgggacaagtatcagggtaatgagtatgcaggggtggtgaccggtctggcgtggactgccgtaggtggtgaaatacttttcgtggaaaccagcctgagccgtggcaagggtggacgtttgacattgaccggcaatttgggtgatgtaatgaaagagtcggccatgctggcattggaatacatcaaggcgcatgcctccctgctgaatcttgacgaagagatttttgataactggaacatccatgtccatgtgcccgaaggcgccattccgaaagacggtccgtctgccggtatcacgatggctacctccctcgcttctgccctcacccagaaaaaggtgaaggccaatcttgccatgacgggagagataacacttcgcggtaaggtacttccggtaggaggcatcaaggagaagatactggctgccaagcgtgccggtatcaaggagattatcttgagcgacgagaaccgcaagaatatagaagagatacaggatatatatctgaaaggactgactttccactatgtgaaagatattaaggaagtgtttgccattgcgctgactgatgaaaaagtagccgatgccatcgacttgtccgtaaagaaagaaaagaccgaaaagaaagaggaatgacattcgagttacaatatacagacagcaagaccaatgcacgtgccggactgattactactgaccacgggcagattgagacacctatctttatgccggtaggtacagtgggaacagtgaaaggcgtgcatctgcctgagctgaaagaggatataaaggcgcagattatattgggtaatacctatcatctttatctgcgtccgggactggaagtgatagagaaagccggtggactgcataagttcaacggctttgaccgtcctatgctgacagacagcggcggtttccaggtattctcgttgtccggtatccgcaagttacgcgaagaaggtgcggaattccgttcgcacatcgacggcagcaagcatatctttacgccggagaaggtgatggatatagaacgtactatcggtgcagatatcatgatggcctttgatgaatgtcctccaggggattcggactacgaatatgccaaaaaatcactgggattgacacatcgctggctggaccgctgtatcaagcgtttcaatgaaacggaacctaagtacggctaccagcaatccttattccctattgtgcagggttgtgtctatcgcgacctccgtgagcagtcggcagagtttgttgcctccaaaggtgctgacggtaatgccattggcggtctggctgtgggcgagcccgtagacaagatgtacgagatgattgagctggtgaacggtattcttcccaaagacaagcctcgctatctgatgggagtcgggactccggtaaacatcctggaaggcattgaacgcggtgtcgatatgttcgactgtgtgatgcctacccgaaacggacgcaacgggatgttgtttaccaaagacggcatcatgaacatgcgcaacaagaaatgggagatggatttctctcccattgaagcggatggcgcctcctacgtggataccatgtacagcaaggcgtatttgcgccatctgttccatgcacaggagctgcttgccatgcagatagcatctatccacaacctggctttctatctgtggctggcgggcgaagcacgtaagcatatcattgtaggcgactttgctacttggaaaccgatgatggtgaaacgcgtatcgacaagattatgagaaaaatgaaccggaggatatggaagaatataaagctgccgagaggtaaattcctgaagcggctggactggtacatcattaagaagttcctgggtacgtatgtctttgccattgcattgattatctccattgcggtggtgttcgacttcaacgagaagatggaccgtttcatgtctcatgaagcgccgtggaatgctattgtctttgattattatctgaacttcatcccctactttgccaacttgttcagtccgctgttcgtgtttatcgccgtaatcttctttacttccaaactggcggagaactcggaaattattgccatgttctctacgggaatgagcttcaagcgtatgttgcgtccttacatggtgtctgcagcaatcattgcggtagtaacattctgcctcgggtcttatgtcattcccaaagggagtgtgacacgtatcaattttgaggacaagtactacaaaccccgtaaggcgaatacggcacggaacatccagctggaagtggattcgggggtaattgcctatatcgaacgttttgaagactacagcaagaccggttatcgcttttctttggacaagttcaatgacaagcaactggtctcccaccttacagcccgttccattacctacgacacgacggccgtgcataagtggaaaatcaaggattatatgattcgccagatggatggcattaaggagagtatcacgaagggtgaccgcatagacactaccctttttatggagcctgccgacttcctgattatgaagaaccagcaggagatgttgaccagccctcagctaagcgagtacatcaacaggcagcggcaacgcggctttgccaacattaaggaatttgagatagagtaccacaaacgcattgccatgtcgtttgcctcctttatcctgacgctgattggagtgtctttgtcttccaagaaaacgaaaggtggaatgggattgcatttaggtataggcttggcattgagtttctcttatattctgtttcagaccattgcttccacatttgccgtgaacggcaacatgcctccggtcatcgctgtgtggataccgaatataatgtatgccttcattgcattctatctatataggaaagcgccgaaataagcattctaaacctctacttcagcttgctcaagttgaggtttggcgtactaaagcagaggtttaggatgtttgtctctggaagcccattaaaataagaagcccctcccacttttgcgttgtacaagtgcgggaggggctttttgttgtattcattttcctcttttgttctgttcccttttttgccggaaagagacgtcggtttctagggaacaccctcactttcgtcttacaggttctttaagttgctgttgtatgcaccgggcatcagcaagcttaattcaagtaagcggaaagttctgcagcagagatgtttttggcaataattacaccattatcatccagtaaatagttagtgaatccgcggcccaagcgatatttcttaaagaggccggaatattcgcctttagtttccacgaaacaagtgggcgtaactatttggtccttacggatggtttcttcaaagattgactgatactcatcgaatgaaactgaaaccatcttcacattgttgcgggcagtagagcgaagcgcattgctcaaacttgcgttttgcatccgggactgcgcgtcgtaacttgcccaaaaactgagcaatacatactttcctttcaagtctgaaagttcggtttgggattgctctgccgacatggtttggattttgaaatccggggccatgtcacccacattcaaacctccggtaggtttgtctttttctacaaaagaagtcaaggaacttattagtaatacaacaaaaatccattttgcatatttcatgcggcacggttttggttaatactatccgggactgtccttcaacagtgatttcttcccggaacatcgtcttgtcaaagccttgaatagtgataaatacactgataatcaaagcttttaattgtgaaatcgggtgcaaaggtaagtaattcctaaacaaacttccaaataaacaagcatttttctcactttttagaggcatatttttatgttatttagcataaatagtgggaattttccttacttttgtagcctattattctatcaaaaagatgacttatgcaaccattgaacactgaactcatcctaatacgtattacgggtgaagaccgtccgggactgacagcttccgtgacggaaattctggcgaaatatgatgctaccattctggatattggccaggcagatattcacaatactctttcgttgggcattttgtgcaagacggaagaacaacactcggggttcattatgaaggaactgcttttcaaggcttcctccctgggcgtgactgtccgtttctaccccattactaccaaagagtacgaggattgggtgaatatgcagggaaagaaccgctatattcttactttattggggcgtaagttgtctgcccgtcaaatatctgccgttacccgtattcttgcagagcaaggcatgaatatcgatgccatcaagcgccttacaggacgtatcccgctggacgaatgcgaatcgcgtacacgcgcctgcatcgaattttccgttcgtggcactccgaaagaccgtattgccatgcaagaacagttgatgaaactggcaaccgaactggaaatggatttctctttccagttggacaatatgtaccgccggatgcgccgcctcatttgcttcgatatggactctacgctgattgaaacagaagtgattgatgaattggccatacgtgcgggtgtgggcgaccaggtaaaggccattaccgaacgcgccatgcgtggtgagatagatttcattgagagctttcgcgaacgagtggctttattgaaaggattggatgagtccgtgatgcaggagattgcagaaaatcttcccattacggaaggtgtggatcgcctgatgtatgttttgaagaaatacggttacaagatagctattctttcgggagggtttacctacttcgggcagtacctccagaagaagtacggtatagactatgtgtatgccaacgagttggaaatagaggatggcaaactgaccggccgctatctcggtgatgtagtcgacggtaagcgtaaggcagagttgctgcgtttgatagctcaggtggagaaagtggatattgcgcagactattgctgtgggcgacggtgccaacgacctgcccatgctgggaattgccggccttggaatcgctttccatgcaaagcccaaagtagttgccaatgccaagcaatccatcaacaccattggtttggacggggtactttacttcttaggtttcaaggattcatacattgatatccattaattcattagtacattcaaaaaaaagtcctatctttgtgctcaaatttaaaagagatacatgaagttttcagaactacatttgaatggtaatgtgctggaggcactggatgccatgcgctttgaagagtgcacccccatacaagaacaatcaattcccgttatacttgaaggccgagatttaatagcggtggcacaaaccggaacgggaaaaacagctgcatatttgttgcctatattgaacaagctttcagaaggtggacaccctgccgatgctatcaattgcattgtcatggctcctacccgtgagttggcacaacagatagaccagcagatggagggcttctcctacttcatgccggtttccagtgtggcagtgtatggcggtaatgacggagttctgttcgaacagcagaaaagaggtttgacattgggtgcagatgttgtcattgccactccgggacgtctgatagcccacctcagtcttggctatgtagacctttcgcgtgtctcttattttattttggatgaagcagaccggatgctggatatgggattctatgatgacattatgcagattgtcaagtttctccctaaagagcggcagaccattatgttctctgctaccatgcctgccaagatacaacagttggctggcaacattctgaacaatcccgccgaagtgaagttggcggtttccaaaccagcggaaaagattgtgcaggcagcctatgtctgctacgagaatcagaagctgggcatcatccgtagcctctttgcagaggagacgccggaacgcgtcatcatctttgcttcttccaaactgaaagtgaaggaagtgaccaaagccttgaagcagatgaaactgaacgttggtgaaatgcactccgatttagagcaggcacagcgcgaagaagtgatgtacgaattcaaggcaggacgtatcaatatcctggtagctacagatatcgttgcgagaggtattgatatcgatgacatccgtctggtgataaactatgacgttccccacgacagtgaagattatgtgcaccgcatcggacgtacggcgcgtgccaataatgacggcgtagccatcactttcgtttccgaaaaggagcaggggaactttaagaatatcgaaaaattcctggatagggacatctataagataccggttcccgaggagctgggcgaagcccccgaatacaagccgagagcatttgacggaggaagacggggcggccgtggaaacggacgtaagccaggaggaaacaagaacggccgtaacaacagtaaaggtggaaagcccagagccaaacgtccacagaatggcggcgagaagaaataaacattgtggtgaagaaaagaaatagaaaaagcggatttattccgctttttctatgttcattgtattgtcaaaaccaataatcatatttaccaaattgtatacggaactttcgggtatgccgagggttgcggtagtgtaaaataaactgtgtcacgcattatttatctctagaaaactcatcggtcggggaacggcccgcgccaaggggcgggaccacccgtcccgacgagcgtaaaattacaataatttaaaccggtttccaaactttatagccagttgttgcgagatggtagcccaattggccagtggcatggtccatttcttacgtatattgcggtatgcaagataaacaagtttctcaagggctgtatccgatgggaacacgcccttgttttttgttaccttgcggatctgacggtgatacccctcaacggtatttgtggtatagataagcttacggatgaccggagtatactggaagtattcggacagcttatcccagttgtcctgccaggatctgataacgacaggatactgttcaccccatttttcatccagcttgaggagctcattttctgcggattccttattgactgcctgatagacacatttcaaatcccttaagaactccttctgattcttggatcctacatacttgatggagttacgtatctgatgtactacacaaagctgtacggctgtattaggataaacgctttgaatggcttcaggaaaccccttcagaccgtctatacaggcaatgagaatatcctcaactccacggttctgaaggtctgtcaacacgctgagccagaagtttgctccctcattccttgatatatacattccaagtaactccttgtgtccctccctgtcaatgctcagtacattatagattgcacgggttaccgcgcagccacgttcatccgttactttgtaatgaatggcatccatccagactataggataaacagaatcaagcatccgtgatttccatgcttttatctccggaagtacacggtctgtgatggaactgattgtgtcggccgaaacacgattcccaagattttcttccatccagtcactgatttcccttgtgctgtttcccattgcatacaagccaattatacggtcagcaacaccttctgccagaatagtctcacgcttcttgataaactggggatcaaaactcgaattacggtcacggggagtggaaacggttacttcgcccaagggagtctgaacctgcttttgcatctttccgttacgacggttacccatctggcgttcttcttctgtcaaatgtgcatccatctctccttccagggctgcattcaatatactttccaatagtggggcaaaggcgccgtccttacccaacaaaggcttgccggctttcagctgttcaatggccttgttcttgatactctcgaaatcaaattcttctttcataaaaaaaactgtgttagcaaagttaatactttattccttgctgacacagtttaatttacatcctcagggttgcctgataatggtaccccttactatctacacccatgaaattcatatcggcaagaatggcctggtccagcatttcggcagggaatatatccgcaaacatctttttagtgatgtcctggccataaagcatcttcttcccttcgtatacacagatgtggattacattatcataatacacattgtccacactgattccattttcagaataggaagtcttgaaaaccttcatctttgaggggttgatatatacatatcccctatatcttgtattcttgtatgttacgatactgtctttctttatcacttccggagtagtagaaatgacctccacttctcgactggtgaaaaccaaagaatcttccgcattctctgatttatgcagtttaattacttcgtcggccagcgagtggaaccagaagctgtattccgtttgacggtctatcttataggccaccggttcattgctgtatatgtagattgtatcgtgaacaaccttgaaaggtacgggagcgctttgcgggttggcataatataccgtatccccttcgatgcgcatcaacggcatttctgtttcatcgttcacccagatgccttgtaacagttgttttgcaatgaggtcttcctttacggaaacctctcctgtttgtctgttgctgcatgaggccaatgagacaacaagtacaatgagaatcgcacttccttttattgtcataacgtccctatttatttcttttcttttttctgcaactttattttccaatgcaatgatatgtgaaaccttgttcttccatatctttcttgtcgtaaatgttacgtccgtccaataccaacggctgttccatagttttcttgatgactgcccatgaaggcaggcggaattctttccattcggtcaccagcatcagtgcatctgcatccagcgcagcatcatacatatctgtcgcataataaatactttctcctatgcggcgtcggcattcgttcatggcagccgggtcgtaggcacgtactttacaaccggccttcagcaactcgtcaatcaataccagagccggggcttcacgcatgtcatctgtttcgggtttaaaggccagcccccaaatggcaatggtctttccctccaaatcattattgaaatgcttctgcaacttttcgaataagatactcttctgtttctcgttcacctcctctactgcatggagtacacgcatcttgtagccgctcagttcagccgttttaatcagtgcctttacatccttagggaagcatgaaccgccgtaacctatccccggatagaggaacttgcgtccgatacgggtatccgaaccgataccactgcgcaccatgtttacatccgctcccaccaattcgcacaaattggcaatgtcgttcatgaagctgatgcgggtggcaagcatggagttagctgcatactttgtcatttctgcagaagggatgtccataaagatgacacggaagttgttcagcaggaatggtttgtagagcttgctcattatcttcttggctcgttcggactctactcccaccactacacggtcgggactcataaaatcgttgatagcattaccttctttcagaaactcgggattcgaagcgacatcgaagtcaatgttcatccctctcttatcaagttcttcttgaatggtagcccgcacttttctggcagtacctacgggaacggtacttttggttaccaccaacacatatttctgcatattgcgtccaatggtgcgggcaacttccagcacatagctcaagtcggcacttccatcctcatcaggtggtgtacctacagcactgaataccacttccacctcattcagacaactctccagagacgtggtgaattgcaggcgtcctgctttcacattccggctaaccatttcttccagtccattttcatagataggaataacaccctttttcagtgactctatcttttcactgttcgtgtctacgcaaataacgttgacaccgatttccgcaaagcaggttccggttaccaaaccgacgtatcctgtaccgacaatggctattttcatattttattcataatagaccgcatccttgaacgatacggcatgtccgtctttatctgataatagaagctgttccgtagcaacgggccattcaataccgatggcttcgtcgtcaaaacggatggatgcctcagattgtggtgcgtatacgttgtctaccttgtatgtaaagacagcttcatcgctcagcaccagaaaaccatgggcaaaaccacgcggaatgaagaattgtcttttgttctcctcacttagctccacactgacatactttccgaaagtgggagaagattttcttaagtcgacagccacgtccagcacttttcccttaatgacacgtaccagtttggcttggctgcaatcacccttctggtaatgaagaccacgtaatacaccgaaagaggatttggactcattgtcctggatgaagtgaacgtttccgacatgtgcacggaactcttcttccttaaatgcttccataaagtatccgcgggcatcatggaatactttcggctcaatcagccatacgccgtcaatctctgtttgtatgtagttcattttcttaaaatgttttatgtactttcagttggaatccaaaattgtctccatatatctctcccatatccaatgcaagggacgcgttgaagcaccagcctttccatttacggggaatatagtaaaacgatgcaaaagtagaaaaattttctaatatatcgggtattggacgatgaggagttccccaagttctgttgtgggacaattttgccacatatctccactcactgctgatgtcgccgctccatcccagatgcagggccttaacgcgattgtacttgaaactcatatcgccatccttattatagataggcgatgctatcaacggattggctatcgccataccccaatgtgcccatcctgggtagtaaccgttgttgtagtagttgtcggctcctccggtcttacctactacagaattttgcaaaccgtgcagtggaccgctcatattggtagtctggagatattcgataacgattccgttgatggcttgtctatggttggatttatattccacaccccataagccatcccaaccgttgagtttggccatggcggagaagtcatcaaaatgattgtccagataggcgctgatggagaaatcttccttaggacgataagtcattttgatatattcgctacccagaaaattgccttggaaagccagatgttcacctaccggtccgtcctcacgcccgtggccggggaagaatacgcgtacgtaatccttccatccgttgcccaagtctcccgattcggaacctccaatcttgtatcctccgaattgggtgtcgagggtcattccgagttccagttgccattttcctttgggtataccgatacgcaggaacccttctttatgatggtatttgatactcttggtgtaccagtatttttctccgacttgctcccgctggtatttgttatctgtaaaccatccgtacgagatttctcctttcaggcctaaacggggtagcaactgtacatactcgggtatgcctatctgtacttgtgggatgggacgcgcattacccgaccaggtcatgccgccactgctcagctcttgattcagcaatggagaattctgttcccggcttccggcaaagaatccaaaccacttgtaacggatgtctacgtaagcctgctgtacaatgaaggaggtcgtgctgaatccggctgctgcaaccaaatccagtgcttcttcaaacttccattttccaagttggtgtttgtaggatattcctccacgtatgtaagtattgttgtcgagcgaagtgagtccttgctggttgctgacctgccaaagaggagtattgtcaccggtatgcagggctgctccatattctacgaatgaggacagctgctgtgccagcatcgtgttctttcctatgaacaagaaaaccatcagacagaaaataatacgcataatagtcttttgttaagtgtttaggtttgtatactcttgcgagggcaattgtctttctattcttgacgagtatagttaaacggtacaaaagtagaaatttttccggtaaaaattccttctcttgccaaaaaacctttttcaaatacattttcaatgtgcaatgttcataatttgttgataagaaaaaagctctgaaactagcgtatatccgatatttccgctacttttgtagcatgattgaattagcacagcacatagaagtattgttattggagaacgattgtgtcattgttcccggtttgggaggatttgtagctcattatactccggcaatgagagtagcggaagagaatgtttttctgccccctacccgtattatcggtttcaatcctcaactgaagatgaatgacggcttacttgtacaatcctatatggctgtctatgatactgatttttctgatgctacgcggattgtagaaaaagaagtggcgcatatattcactgctctccatgaagaaggtaaggtggatttgcccaacattggcgaattgcgttactctattcatggtatttatgactttgttccctatgaccacaagataaccactccttacttatatgggttggatagttttgaaatgcaggaactggcggaactgaagaaaccgtacatggaaaagaccatccgttattctgttccagttgtgccggaagacaaaaagcgaaggtttgagattaaattcaaccgttcctatttgtcgaatgcggttgccatgattgcagtggttgccttgtttttctttttgtctacaccgatagagaatacggaagtggttgaaggaaattatgcgcaattacttccgaatgaactttttgagatgatagaaaaggaatcccttgccattaatccgattgttgttagccggaaggccgacactccgaaagcgtcggctcaaaaaaacacggggcagaaggcaaagaaaaaggtggttccagttgccgtaagagaggttaaggtgggccaagctaacgcgcagaatgctccggttgtttctcagcctaagcagcaggcggcagaagtgtcctcttcaacatctgtaacaacaaagagtgaaattcaaaagaccacagcagggactgtcgccccgtcacttgtctctgcacagaaataccacgtcatcattgccagtgtaggtactgagaaggatgccgaagcaatggcaaagcaactgattgaaaaaggttaccctcatgcaaaagcaattgttggagatggtaaaatgcgtgtcagcattgagtcttgtggcacagaaacagaagcatatcaggcattgaacagagttcgccagaatgaaacgtataagaacgcttgggtattaaagaagtagaaagtaatctacccttgctttattttttaattctttaatttttaactatcatgaagcgtatccgttgtcccaaatgtgagaattacttaacattcgatgaaaccaagtataccgaaggccaatcactggtctttgtatgtgaccagtgtaagaagcagttcagtatccgtttaggtaaatcaaagatgaaagcccctcaaaaggaagaacgtccggatgaagcggagtttaaagaggcttttggcagcatcacggtcattgagaacgtgtttggttttaagcaggtacttccattgcaagaaggtgacaatatcataggccggcgttgcgtggggaatgttatcgatgtgccgattgagacttcggatatgagtatggaccggcgtcactgtatcattaatgtaaagcgtaataagcagggagtgttgatttataccttacgcgatgctcccagcctgacgggaactttccttaataatgaaattttgggtgacaaagaccgtattcgcattgaggatggagccattgtaactattggtgccactacttttatattgcgggcagcagagcaggaaagcctttagacaaaaaagaaaactgtggcttaattatttcccatcaaatgtggtataaataaagcagaccgtataaaaactccttttgtacggtctgcttgtttaaaatcataggaattaaagaataccttttactgtttcctgcatgcctttttcttggatggattttaagaagcaggtaatcatgtctgtcaatcctggaacggtattcaagtctccgtgttccccccagataaggtctttggctgccaatacgccttctgccactttgcgggtatcccccgttgcccaaaggtctttcaataactgcatgatttcgggagcatcattcgggatgatttctgtgccgtctgcgcgggtacctcctttgtagtacgtgatgatggcagccagtcccaataccagacctttcggcagttctcctttacgtttcaagtaggttttcaggccaggaaggtcacgggtttggtatttagggaaagagttcagcataatactggttacggcatggtcaacaaacggattgttgaagcgctccaatacatcttctgcaaactttttcaattcgtttttcggcaggttcaacgtttccatcagctcgtcaaacatcactttatggatgtattgtccgattataggatgctggcaggcatcgcgtacaatatttacctccgacagataggctactggagacaatacggtatgaggtccattcagcaaggttacttttctttcgtggtaaggttcttcagaaggaacaaacaatacattcagtccggctttgtcggcagggaattcttcggcgacttcttgcggagcctcgatgacccataaatggaaaatttcagcctgcactaccagattgtcatcgtactgtatcttttcttttatagcggcaatgtctttgcgggggaatcctggaacgatacggtccaccagtgttgcatacacaccgcaggcttcctcaaaccaagctctgaactcatcacccaattgccataattcaatgtattgatagattgtctccttcaacttgtggccattcaggaagatgagttcgcaagggaagataatcagtcctttgctcttgtcgccgttgaatgtcttgaagcggtgatacaacagctgtgtcagcttgcccggataagaagacgccggtgtatctgtcagcttacaagcagggtcaaaggctatacctgcttccgtcgtgttggaaatgacaaaacgcatttccggttgttcggccaatttcatgaactcatcgttttgagtataggggtttaaggcacggctgattacatctatcatagtcagactgttgatggtttctcctttatccagaccttgcagatttacatgataaaggtcatcctgggcattcagcatgtcaaccatacctttatcaatgggttggactactactacattgctgttgaaatcggtcttttgattcatgttataaataatccaatccacaaatgcgcgaaggaaattaccttcgccaaactggataatgcgttccgggcgttgtgctttgggagcagtttctttgtttaatgctttcatttaaatggttgatatgtaattttttaattattcaaactcaaagtaaaagtctatgttttccttcatcaatatgtcgataggcatgtatttcactgcagtgaccggtcttttaaataccacgtggttgcataaagtctttacgccacaatagccttgcaggcctggacgttgaccgatgagaaaggttacttcaccggttttcaggaactctgtatttttgtgtaaaaggtcatatcccacaagtcctgccagcttccaccccttttcgtgcagataacttgccacttgataaacacgggaattaaaaacagctcccagtacggcttggggatgttctttaaaaaaagcatccaatatccgtctgttgccgtcagtatcttccttgtgcaacacaatgtcatggatagtcaaatccttatgttcctcggaaaggtattgcatgaacccctcgaggcggcgttgcatctggatttctgccggattgtttttctgattgctcaggaataacacaagctcctgccctttttcatagctacgcatcagaatcttggcagcaatgtatccgctggttttggagtcttgtccgatataacacaaggcatgcgtctgttcaatattgaagtctatgaatgcatagggaatatccgcttcctccaaataagtagtgagttttatggtctcctctcggaaattcggggcaacaagtacggcgtcggcattttcctcccggagcacagcacatgcttctttataggaggatttgtccgcatgccgatagtacagatagctaaccccaacattgaacggccgtaattcttgtgcggcacggtcaattcccgctgctacagcatgccaataatcatgttctatataataaggtataatgcagacaatatgatagcgctttttagccgccagcccgatggcaaacatattgggatgataatctatgtcgtcgagtactttctggactttttccctactggaaacggatacgtctccgcggttgtgcagtacgcggtctacagtgccggcagagacgccggccatgcgtgctatgtctttaatggtatagttcttgttttccatcttgaggtatgctgcctaaggcggtaaaggtgagacgtctgaagcttaaatattataaatattcgccgcaaagatacgaattattttgtttctccaagtaaaatttctacttttgtgttcgataacggttaataaaactaaaaacaattatacgacctattagctttacaatcaatactatataggtgtaataaatagaaagtaatatttttagatacttaaaacacaagaagatgaaaaactttatggacggaaactttctgttgcaaacggaaacagcacagaagttgtaccacgagcatgcggctaaaatgccgattatcgactatcattgtcacttgattcctcaaatggtggcggaagactatcagtttaagtcactgactgagatttggttgggaggtgaccactacaagtggcgtgccatgcgtaccaatggtgtggacgaacgtttctgtaccggtaaggatactacagattgggaaaagtttgagaagtgggccgaaacggtaccttatactttccgtaatccgttgtaccactggactcaccttgaattgaagaccgcttttggaatcgataaaattctcaatcctcatacggcccgtgaaatttatgatgaatgtaatgagaagctgaaacagcctgaatattccgcccgtggcatgatgcgccgttatcacgtggaagtggtttgtactacagatgatcctattgattccttggaatatcatatcaagacacgcgagagcggttttgaaatcaagatgttgcctacttggcgtccggataaggcaatggcggtggaagttcctgccgattttcgcgcatatgtagaaaagttggccgaagtgagcgatgtggctatttcctgctttgacgatatggttgctgccttgcgtaagcgtcacgattttttcgcggaacaaggatgtaaactgtctgaccacggaattgaagaattctatgccgaggattatacaggagcggaagttaaggctatctttaacaaggtatatggcggtactggattgacgaaggaggaaattctgaaattcaagtcggccatgctggttgtgttcggcgaaatggattgggagaaaggttggacacaacagttccattatggtgctattcgcaacaacaatagtaagatgttcaaactgttaggtcctgataccggttttgattccattggcgaatttactacagcaaaagctatggctaaatttctcgaccgcttaaactccaatggtaagctgaccaagactattctttataatttgaatccatgcgccaacgaagtcattgctactatgctgggtaacttccaggatggtacggttgccggtaagattcaattcggttccggttggtggttccttgaccagaaggatggtatggaaaagcagatgaatgccctttctgtactgggcttattgagccgatttgttggtatgctgaccgattcccgttccttcctctcctatccgcgccatgaatatttccgccgtacattgtgtaatcttgtaggccgtgatgtagaaaatggtgaaattcctatttccgagatggaacgcgtaaaccagatgattgaagatatcagctattataacgctaagaatttcttccaattctaaaaagcaatagtaagctataagttatgcagtttcacccataacttatagcttatctaatattcctttgatactatccaatcgtataaaattgggatgtcgtatttccccttcatgttgctcgtatgcccaagtcacgtggtatggtacatgggcagcgtatcccccaagttccaataccggaagtatgtctgattttacagaattacctatcatcaggagtttttcaggcggacagcccaatgtatcaatcagcctctggtaatcatcgattttcttgtcactcataatttcgatatgatggaaatattctcgcagtccggaagcttctatttttcttttctggtcgaacaagtcccccttagtggccaacaccaatttatatttcccatgaagtgacgatatggtctccttcacgccttccagtagtgtaaccggtttctgcagaagctcttgtccccatcctattacttcttctataagatgcatattcccgtttccgtctgtcactttgcagatggtttcagtcatactgagcattatgctcttcagcccatagccatacatatgcagattcttcatttctgtttcaaaaaacctttgtgatatggatgaagcaggcagatattgccttaaaaggttacagaatttgtgctcgaactcctgaatataaagttcgctttcccacagtgtgtcatcagcgtcaaaagctataaattcgattttatctttcatgaatggtcgttttataaaagcgtccaaagatacggagtattctatataaatgaaaagataaatagtgataaatgggaagttaatatcttgtctgcaacttattaatattgtgtttgcagaaaattaatatcttgcaaacacgatattaatttcctatttttgcatttattttttcatttaatacataaattttaatcgtacaaaaggatgatgacatcaccccaacccgcttccaaaggcttcagcagagctttttgggtaagcagtacagtagaactgttcgaacgcatggcatattatgctgtatttattgttcttaccatttatctttccaatattttaggtttcaatgattttgagtcaagcatgatttccggtctgttttcgggagggctctatttgttgcctatctttacgggcgcatatgccgataagataggtttccgaaagtcgatgattattgctttttcactgctttccatcgggtatttgggcttgggattgcttcccaccctactggaagcagccggtctggtggagtatggtgagacaacccgtttttccggattgccggatagtaatgaccgttggatgattatccccgtattgtttgttatcatggtaggaggctcgttcatcaagtctatcatatcgggatcggtggctaaggaaacaacagaggctacccgtgctcgcggctattccatcttctatatgatggtgaatataggagcttttaccggaaaaacggtggtcgatcctctacggaatgttatcggtgagcaggcttatatttatatcaattacttctcggctgccatgacggtgcttgcattattggctgtcgtcttattgtataaatcggcacatacagcaggtgaagggaaaagcatgcgtgaaattgggcaaggttttctgcgtattatcactaattggcgtttgttgattcttatcctcatcgtaaccggcttttggatggtgcagcaacagctctatgcaactatgcccaaatatgtcatccgtatggcgggtgaaacagccaaaccggggtggatagccaatgtaaacccgtttgtagtggtttgctgcgtaagttttatcactcggtggatggcaaagcgcacagctattacttctatgaatataggcatgtttcttattccggtatcggcattgctgatggcatgcggtaatttgctgggcaacgatattatttccggcatgagcaatattactttaatgatggtacttggtattgttgtgcaagctttggcagaatgttttatctcaccgcgttatctggagtacttttctttgcaggcccccaaaggtgaagaaggtatgtacctcggtttcagtcatcttcattcattcctctcttctattttcgggtttggtattgcgggggtgcttctgacaaaatattgtcctgatccagtcttgtttgaaacccgcgaagcgtgggaagcagccagtgtcaatgcacattatatctggtattatttcgctgctataggattggttgcagcaatagcattattcgtttttgccaaaactaccgaattcatcgacaaaaagaagaaggcataaggtttatatattgcatactttttgtatatttgccgtcactttttttaaaagcgacggcttttttgtaattaaggagattaggatgaaagtaaaatttataagccttgccagtggaagcagcggtaactgttattatataggcacagaaaaatatggaatactcatcgacgccggcattgcagtacggacgataaaaaaaggactgaaagaagcaggtatcagcatggaaatgatacgtgcggtatttgttacgcatgatcatgcggaccatatcaaagcagtaggcggattgggtgaaaaactgaatattcctatttatacaaccgcccggattcatgagggcatcaaccggagctattgcatgacagaaaagttatattcgtctgtccgttacctggaaaagcagcaacccatgcagttggaagattttcatatcgaatctttcgaggtacctcatgatggcacggacaatgtgggctattgcattgagataggcggaaaagtgtttgcttttcttacagaccttggtgaaattactcctacggccgcagaatatatcagaaaggccaattatctgatattggaagccaactacgatgaggaaatgttacgcatgggtacctacccccaatacctgaaagaacggattaccagccgcaccggacacatgagtaatattgctactgctgaatttctttcggaaaatatgacggaacatttacagtatatttggctttgtcatttgagcaaggacaacaatcatcctgaattggcatataaaacagtggaatggaaattaagggaaaaaggaattatcgtaggaaaggatgtacagttgtgtgctttgaagcgtactactccttctgatttatacgagtttgaataaaaaatcccatttcatcgcaaaaaatacaccgttttgtttgcacgaataaaataaaaggactacttttgcacccgcaaacaagaaataaggaatgcactcttagctcagttggtagagcaactgactcttaatcagtgggtccagggttcgaatccctgagggtgtacttaaaaaaggaacaactactgttgttccttttttaatttgtcttaacaagaacatgctttgatgggtataagctcctcatacggaatcactagtaaatctatatggggatgatacattatttttcgttagtccgcataataaattcttcagaagtttgtttttatacctttgccctcacccgctttccgcctctttcgtcacattcgaaaatatatgtcagaaaatgaaagtaggaagaaaacttttatttcctcctactcgtatatctatattttgtatatttgtacacacatcaatgattttaaactaaaagaaaaacaatatggataaagattcaaagcaagtagtggttcttctgacacatcccaatataaaagagtcgcgagctaacaaggcattgatggatgctattagtgacatgggagaggtggccatatacaatttatatgagatgcgtgtggaagatgcttttaatgcagagatatggagcactatcatatcgcatgcatctgcgcttgtatttcagtttccgttctattggatgtcggctccttctttattgaagagatggttggatgaagtatttacttatctggcaaaaactcctgctgtggctggtaagacattgatggtggtcactactgccggctctgaacatgatgcttatagaagcggaggaagaaatcgttttacggtggatgagttgttaagaccttatcaagcaagtgctgtacatgccggaatggtatggcaaactcctcttatagtctatggaatggggacctcggaagctagtaaaaatatagcagaagggataaattgctataagcaaagaattgaagcattggtgaagaaagacatttccagtgataattggtaatagtaggaccatatcgaaatggaacattctttttcattttttgaatgtttgtttttctctttatctttttctaaaatcctgattataagcaataaataaaatattgtatgagttggcatatttcttgtgttaactcatacatgaaattttatattatatcaaacagattacccgttaaggttaccaaagaggatgaaacgttcgtgttttcatgaagtgaaggtggactggctaccggtttggactcacttcagatttcctacgaaaaacattggattggatggcctggaatatgcgttgacaacgaagaaagtaaaaaggaaatcacttctagattggaaggaataaattttcacccagtattcttgtccgaaacacagataaagaattattatgaaggctatagtaatagtactatttggccattatgtcactacttttttgtttatacgctatatcggaactctttctggcaatcgtatcaggaagtgaaccagttgttctgcgatgccatttgccgcgtgatacatccaggtgacaaggtgtggattcaagactatcagccaatgctgcttcccggaatgcttcggaaggtttacccgaatttgaatatcggatatttccatcatatccctttcccttcctatgaacttttccggatattaccggaacgtgcagaaatcctgaaaggattattggatgctgactttatagctttccatacttatgactatatgcggcattttatcagtgctgtcaaacgggtactgcgtattgactttaaactggacgaagcacaactcgggaatagagtagttgagaccgatgctcttcctatgggaatcaactacggactgtatcacaatgcttcttccagaccggaagtacggcgggcgatagaccgtacacggaaatttttcggaaatcataagttgattctttctgtagaccgcttggattatagtaaaggcattctgcaccgtttatttctttcgtttttaattccattgaatgatgatatctttctttttttctttatttttgcataaagaaaatttcactatttcggcagttgttttgtactcatatcgctgatatagaatgtttaggaactcaaaataaaggattatcatgttacggaagattagactgacttttgcaatgatttgttttgcactcatcaccttgctgttccttgattttacgggaacgttgcatgggtggttcggctggttagccaaaatccagtttttgccggctgtattggcgctgaatgtgggagtgatattgtttcttgtaattctcactttggtatgcgggcgtatctattgttctgtgatttgccccttaggggtatttcaggatatactggcatggctgggccggcaacctaaaaaacgcaggaagcttccttactcttattctccggccttatcttggctgcgctatggcgtattgggtgtgtttatcattgctttgattgccggaattggttcattggctgctctacttgcaccctatagtgcatacggacgtattgccaataatctttttcaacctatatggcaatggggcaacaatctgcttgcttatctggctgaacgggcagacagttatgccttttatgaaacggatgtatggttccttaattccgcaacactattacaaatataactttttaagtacctgagcaacaaaaagttgctcaggaatttgccatgtcagatttttcacctatcttagtgttgcaaatcaaaatatgtatcaaacccgacagacatggcaaaggtagcaattaaatccgagaaactcactccttttggaggaatattttcaataatggagcaatttgactccagactctcatctgtaatcgactcaaccctcggtatgagatgcaggctgtatggttatcaatacagcgaaatcatccgttcgcttatgagcgtttatttttgtggcggctcatgcatcgaggatgtcaccactcatctgatgtaccacctttcgcttcatccgacacttcgcacatgcagtgccgacacgattcttagagccataaaggaactgacccaggataacatttcctacacatccgacactggcaagacctacgacttcaacacggcagacaagctgaatacactgctcctcaattgcctattgtccacagggcagctgaaagagggcgaggggtatgacgttgacttcgaccaccagttcatagaggctgagaagtttgatgcgaagcctacatacaagaagttccttggttatcgccctggcgtggcggttattggcaacttgattgtcggcattgagaacagcgacggcaacacaaatgtccgtttccaccagaaggacacgctgaagaggttctttgaaaggtttgaacaaaacaagcttattatcaaccgtttcagagctgattgcggctcgtgttctgaagagatagtggaagagattgctaaacactgcaagaccttctatatccgtgctaaccgatgcagttcgctctacaatgacatctttgccctcagaggttggaagaaagtggaattgggcggcattgagtttgagctggcctccattctcatcgagaaatggaaagggaaggcataccgtcttgtgattcaaagacagaagcggatagacggcgaactcgacctgtgggaaggagaatacacctaccgctgcatccttacaaatgactacgagtcttccgagaaagagattgtcgaattctataacctccgtggagggaaggaacgcatcttcgatgatatgaataacggattcggctggaacaggcttccaaaatcctttatgggagaaaacacggtgtttcttctgcttatggcactcatacgcaacttctataaattcatcatggcgaggcttgacgtgaagaggttcggactcaaagcaacaagccgcatcaagacgtttgtctttaagttcatctctgtgccagccaaatgggtcaggacatcaaggaagtatgtgctgaatatctattcatgcaacaatgcttatgccaatgtgttccagaatgactttggataacaccgacaacttatagtcgtgattttgcgtattgcctcaagtcgcatggtggggtaaggggcatttatatgtctttatggtgacattcgatgcactgtgccccctttttactaacgatgcagattcttttcgcttctgtatcatattaggcgcgtagttgcggatttgaggtggttgaagagcctgccgacttttattattgctgccgctactttggctgtgcttgttgttctggccggacgcaacggacgaacctattgtaatacgatttgcccggtaggaacggtcttgggcttcctttcacgttattcgcttttccgcatcacaatagatttggaaaagtgcaaccaatgcagtctttgttcacgcaactgcaaggcagcctgcatcaactttaaggagcatcagattgatgcaagccggtgtgtggtttgcatgaactgcattgagaagtgcaagcatggagccatttcctacaagtatcatcctttcggtaaacctgctgcgggcaaggcagattcggaacagataaacgaaacccgccgcagttttttcacagcaacggctctggttgcagccacttctgttttaaaagcgcaggaaaagaaagtagacggaggactggcagccattgaagataagaagattcctgagcgaagcactcccctcactcctcccggctcattgagtgcccgcaatatggcgcaacactgcacggcctgccagctctgtgtgtcggcatgtcccaatcaggttcttcgtccttctgcagacttaaggaaattgatgcaaccggaaatgtcatacgaacgcggctattgtagaccggaatgtacaaaatgttcggaggtatgtcctgcaggggctatccgtccgataaccaaagctgataaatcatccgttcagatagggcatgccgtgtgggtaaagaaaaattgcataccactgacggatggtgtgcagtgtggcaactgtgcacgccattgtccgacgggagccatacaaatggtgccgagtatacctgaagacaaggattctccaaagattccggtaatcaatgtggagcgttgtatcggctgcggggcatgtgagaatctttgtccggcccgtccgttcagtgccatctatgtggaaggacatgaaagacatcgaattatataacaaagtagaatttctataagtatggaagaacatcataaaaacaatatgaaccgtcgtgatttcttgaagatagtgggaattacaaccgccacatctactgctgccctctatggatgtggttctaaggaaggaagcagtgaaggcagtaaagtattgggccccattccgacggataaaatgacctatcgtagttttcctggtttggggagtgacaaagtttctattttaggatacggctgtatgcgctggcctaccgttcctgctccggatggaaaaggggaaatgatagaccaggatgctgtaaacgaactggtggattatgccattgcccatggcgtgaattatttcgatacgtctccgatgtatgtacaaggatggagtgagaagtctacgggaatagctctgaaacgccatccacgcgaatcgttctatcttgccaccaaactatccaattttcatcctgatacctggactcgcgagggttccatcgccatgtaccgtaagtcgttcgaggatatgcaggtggactatatagactactatctgctacacatgattggtggcggtggcatggagcaattccgcaaacgctacatagacaacggtatgattgattttcttgtcaaggagcgtgaagcaggacgcatccgccgtttgggatggtcgttccacggagatatcgaagtctatgactatgccttgcagatgcatgaccgtggtgaagttcattgggactttgtacaaatacagttgaattatgtggactggaaacatgcttcgggcagcaacttcaaggcagagtatctgtatgacgagctggccaagcgtaagatccctgctgtcattatggagcctctgctgggtgggcggctctccaatgtccccgaccatattgtggcacggctgaagcagcgcgaacccgaacgcagtgtggcgtcttgggcattccgttatgccggttctccccaggatgtactgacagtgctgagcggcatgacttatatggaacatttgcaggataacatccgtacttactctccattggtaccactcacagaagaggaaactcagtatctgtatgatacggcagatttgatgatggagtaccccaccataccttgcaacgactgcaagtactgcatgccttgcccgtatggaattgacattcctgccatcttgatacattacaataaatgtgtcaatgaaggaaatgtgccggaaagcagccaggatgagaattatcggaaagcacgccgtgcttttctcgtaggatatgaccgaagtgtacccaaactgaggcaggccgaccattgtaccgggtgcaaccagtgttctccgcattgcccgcaaacgattgatattcccaaagaactgcatcgtattgacaaatttgtagaacagttgaaacaagagactttataaaatggagagtatcattgacatactgcacaagggaggatactcttgtgttatgaagaaccgggaggaagtccgtactttcacccaacggggagtagcggatttgtatgatttgtaccaggcagattctgcatttatgaagggggctaccattgccgataaggttatagggaaaggtgccgctgctttgatggtactgggaggctttaaaacggtctatgccgatataatcagcactcctgcgctggcattgctgtgcgaagcaggaattgaaacgacttttgcccaagaggttccccatatcattaaccgtgacaagaccggctggtgcccgttggagacggcttgcatggagctgaatacggtagaggagatgtatccggtgattcagaattttatatcaagaatcagggcaaaatagcaacagcctgctctctttccctgattacctgatgcctttctcttccagcatcttgaagtcttccttgagcataccgacatcatccagtgtgcgggcttcattgtggtcgttcagatagactctgggtctttcgataaacagagcgctggtgacagataaagagtcattccggtatggggtctccactccacctatttccagcattgtctggaagaatgaggcactggaagatacattcttctgcctattggcttgtgcggcctccaataacgatgggtatctctgccggtagttgtcggacatccaaataaagaatggcacatgtatctgataataggaaggtaccggtgaagcatgcagaaagagatgccggttgtcatcgaaaatatcttctccatggtctgaagtgtatatcagggcagaattgacatgttgttcttgaagcatatctatcagacgaaccagaaaattatccgtgtagcggatagaattgtcataggcattaatcaggttgtctttgtatttcacttccgcatcaacgggcatgtccggcaggaagaaagcctgctctgccggatagcgctctttataattgaaatgagaaccgtaagtgtggagaactataaattgcctggaaactcctttgcccagttcttttgctaccagtttcaacagttcgttatcagaggggttgtaattggaatcccccacatcttctttaatgaaatcatacgtgtcggcttctttgccgaagaagtctataaatgagtggttataacgctggttcgagaaaaaggcggtctggtaaccggcttccttgaatgctgtgataatccctttctgataatagatggaatcaaaactggaagcactgaccggcgacagcaacatcggaacactcttgtgggtagtgtttgattctgtcagcacatggctgaaagctgtcagtccgccaatgcccgacagtcccgggttagtctcccgttcgtagccgtacaaagcccagttgcatgcccgtgaggtttctcccaccaccattacatatacttccctttcatcagcctgatgagtacttctagcatgaaaggtaaaatctttagaggtcttgtgataattccgcgtctgggccgtccgttgaaaagcaagtgctatgttgtagcatacgttggcaggatacagttcggatttcggctcataccggttatctgtcaaataagcagtgcctaaggataatattccggcagacaacacatacagagtgcgacggcgagcttgccggatgaatgcttcggacagtctgcgtttgtgtacaatggatatggttgccagaattaatgcaggtatatagagcactaccacaataacgatggcaggtatcagattgtccagcagttccagcgcctcgctcgaattggttgtcaccagattcagaaacatatccactgcgataatggactgaccgaaaagatacagcaatacaagctggaaggctccgaagaagatgaacggaaatagcagccagaatgtcctgccacagtttctcgaccaagccattacagcataatatatagaaaggggtagcaggatattacatatctttgccgtccatgatatgggttctgtaaagcatagcactacattgggcactatcagaatgaccagaaacagatagaacaaatgttcctgattgtcgaaccatttttttatgtctctaaaaagcttcattgatattgaatataaatccggtctggtgtttgccaaaacctaaatccaaacgtacgtttactctctttttgaactcccagcggtagccgaaaccataattaggaagaatatgcctggcctccaattccgagaaattcgggaatatggttcccgcccctacccatacggcaactccatttcgcttccatacatgttggcgtagttccagctgggcatccattgcacacttgtcacggtagcgcccctcataatagccacgcatagaataggaacttcccaatgttgccatcagtccccagggcggatttccgtagttcagcagagtatggaactggcctgccaacaccccacccttccacacggactggtaatagctggtcgtcagttccgtattgctgaatgcatatttatttcccaaaaaggccggactgaagcgctggtctatccgtaggtaatatcctttataggcatttgtcagaaaatcgcgtgaatcatacaacaaggaaaaccccaagctcacgttggtgctacgcgctttcattcctttccataattccggtttttcaaagtcatgtccatacacgtaatcaaatgctgtcatcggaccgatataaaagttacgtgccatccggaacatgaagtccaccttaacctgcgcctgaaagcgatcgtattcactctcattgtcatcattggctccattgtcatatccttgtccccagtaaaggcttgggaaagaatagaaatacagattgtagttcaaccggtatttgtcttggggaaacagatggtttccacgtactcccagcaaatagaatcccactgtggagacatccccatacagagagacattggacggagggagaatactatcgttccggtcggtacggtagagtcctgccgccaccagtccgattccaaatttggtgtcactggaataatgaggtccgcctataatgctgaaatcaaatttcttgtttttcttttctttgttggcatcgttgaagtaattcaaaatttttccgaaaaaactgcgtttcttgggaagcgagtctatgggatacgtagaaattgagtccacagagttttttgcttctgcaaggtgtgtttgtgcatgaacagccgtttctgtaatcagcatcaatattggtaatatccattttgtcaatttagtgtccatttacttgtagaaaacttccgtggcaaagttagtttttatgttcttcattacaacaatgttactgttctttttgtttccaatttttctcttttaatgttcatttctacattgcatgtggggttcactctttttaactacatcatttatagaactttcctcgatttatactgttattttaatattacaaagaacaacatgatattgaattatgaaaacagcaatggacattcccgataaagagggacagaaacgactggtaatcgtaggcggcggctttggcggattaaagctggcacgaaaattgaaaagcaacaagtttcagatagttttactggataagaataaccatcacatcttccaaccgttactctatcaagtggccacagcaggtattgaaccgagtgccatatcattcccataccgaaaaatcttcaaaaaaagagagcatttccatatacgtatttgtgaagcacagcaagtcttcccggaacacaatctgctggagacttccatcggcacgctggcatacgactatttggtcattgccaccggctgcaacacaaattattttggaaacgacgggctggagaaacagaccatggcactaaagaatacttcggaagccttgttcaaccgaaaccagatattggatagttttgaacaagcccagaacaccggtaataaagaagagcgcaggcgtctgatgacctttgccattgtaggcggtggagctacgggaatagagttggctggtgctttggccgagatgaggaagtttgtccttcctcaagactatccggacttgaatatcaatgagatgcgtatcatcttgttggatggttcttcccggctcttgtctgctttttcagaagagtcttccaaagaagtggccgattatctgaagaagcgtgatgtggaaatcaaattgaaccaacgggtgatgggatacgagaattatcaattggcattgaatgacgggactgccatcgataccaaaaatgtattctgggtggccggtgtcaaggcaaacagccttcaaggattgcctgccgatgcctatggaccgggaaaccgcttgaaggtggacacttataaccgtctttctcaatatcccaatattttcgctatcggggatacggcccttatgatttctgaggagtatcccaaaggacacccgcaagtggtgcaaccagccatccagcaggcccgcaacttgataaggaacttgcagcgtgcagaaacaggcctgccgttacagccgtttatatatcaaaacaaaggctccatggcgaccattggccgcaatcatgccgtagtcgagcttaagaaactgcgttttggcggttttccggcatgggctgtgtggctattcatccatttgatgagtattgtgggtgtaaagaaccgtcttttcatcttcgtagactggatgtggagttactttacctatgacccgtctttacggattatcatcaaacccttgaagcgggagtaaacttttattgagtaatatttgttatagttcatatacgaacttaaaaacgaatgaatatgttaaaacaacttttatttcccgccaaaccggacggaacggcaacatctgctatgctattgattgcaagaattgtattcggtatattattaatgaaccacggtatccagaagtggactaactttcaagagctgtcggccgttttccctgacccgctgggtgtaggcagtccgctgtctttaggactggctatctttggtgaattggcatgttccatggcattcattataggttttctctatcgtttggctatgataccaatggtgtttacaatggctgttgccttttttgtaattcatggtaatgacccgtttgccacgaaagagttggcttttgtatatctggtagtgttcatattgatgtatatcataggtccgggcaagtttgccgttgaccgctggataagaaaagctcttttccaaaaggctcgtaaatagacacttccgttttactgaaaacagattttaagctcaaataggatgtattttcgtaaaaaatcctatatttgcggatgcttaaaataactcgatgagctataaagctaattaaacacagtaaaataaaaaagagtgattatgaaaaagttcaatttgaagatggctgcgaccgtaatgatttgcggctcgtttcttttcagttcttgtatcggttcttttggactgcatagtaaactggtcagctggaatcaaggtattggtaccaagtttgtaaacgaactggtttatctggcattcaatattatcccggtatatggcgtttgctatctggccgatgcattggtcatcaactccatcgaattctggagtggttcaaaccctatggccagcattggtgatgtaaagaaagtgaaaggcgaaaacggtgactacctggtagagacacttgaaaacggctattctatcaccaaagaaggtgagactgcttctatggaactcatttacaacaaagagttgaatacttggaatgttgttgccgatggtgtcagcacagaattgctgcaaatgaacaatgacggcactgcacaaatgacccttccgaacggtgaggaaatgacagtgacgctggatgcccaaggtgtggcagcagcacgtcaggcgacgatgattggcacgtactacgcttttaattaatggaaaatggaaaattgaaaatggaaagtggctggtacatagatgcccaataagcatttctcactttccattttcaactttcattagaacggatatcccacagcaaagtggaaagcaaaatcgcggctgaatttaggatgaataatgggataacggtcttttttcttttcataagccggattgatggccttcatacctccgtcgaaacgcaatacaaagaaatccaggtcaagacgcaatcccaaaccatatgccacggcaatctgcttatagaacttgtcaaatttaaactgacctcccggctggtctttataatcccgtattgtccagatattcccggcatctacaaagagggctcctctgaatttccagaacaaccgtgtgcggtattcaatgctggcatccagcttgatgtctcccgactggttcatgaagttattatcgccggggaaagaaccgggccccaaatcacgtacagaccatccgcgcacactgttggcgccgccggagaagtagcgcttctcaaatggaagcattgttgcattgccgtatggaatggcaataccggcaccaaaatgaaatgccaatgaattgcggttgtcaatgaccagattcttggcaaagtcaaaatcgcctttcaggtattgggcaaaaggaatgttcaacaaagtgtattcccccgatgcattctttttcattcctccgagctttgccacagcatacaacaagttacccgccgattcaaaattgaggcggatggtataggaatttccgataccggagttattcatcaatgctcttccggcactgttgtagatatagctatagccggtgcggacaataaagcggtcttcataattgtatttgaggatgtagttctcgtctttctccagataatcctctttgaatgtctggtctatgctgggcatatacagatagttgatgtccagcaaatcaatgcgatgctgcgaacgctgttgttgtaccccccatttgtagctccatccggcagatgctacaatgcgcgtgaattcgggtctcatctggtagttatattgcaatccgaattctgtagtagcccttatcctccgcttgaaatcgctggatacaaagggaaacataaaccgtgggaagttgatggttgcttccgcacctaattctatgtagtcttgattcaaggagctctgcaaaccggacacagcctcgtatgccccacgtagcttgaacatgaatgtttcggaacctttgaacatgttgcggtgctgaaaagccaccgaagcggcagctcccaaatcgccggcagagtttgtgccttccacctcaaaagatacggactgatgcttgcctctggtcagcatcacataggcgttgagctttgcactgtcactctgttgcacttcaaaaaaacggatattggtatatttcagggcttgcaggcgtccgtagttggagtaggtacgctgcacgttctgctcgttatagagagttcccggagtgatgcgcagattgttggtcagcactttggggcgcagataaagcttgtctttgtagtagatgggaaagcctttgtaatgcaatgaatcattcacctcgatgctgttctgggtggatgcctgcaacacattataatcggtaatgaaactcactttattgatagtgtattgccggtgattctgcggcgtatcctcgttatgctgtctgtatggagccaaatgcagtgtcaaatctaccagataagaattacggacagtatccgcagtataggatatgtactctttattgaacttgtaatatccattctgaagcagtttgtttgtgatgcgctggcgttctgcatccagtacattgacatcaaaatacatgccttcggataataaggttactgcggaatcctgccgcatgtattcctttattttactgtcctggatatcatatttcaaggtacgaactttatagggcttgccggttgtcactttatagaccaacttcatctttttcttcttgacttggcgtaccggttccaccagggcgcccatatagcccatattctgcacagccttagtgatttcttccctggtccggttggtttcctcctcactgtatatgaccggggcatcacctaatttcctcaatgtacggtttatccagcgtgtagagtcccgtccggaccagttgtagacatacaactgggtctttatcaggctgaaccacttcgcattgggattctggcggatgtacatggagagattggatggttttacttccttattatcagtatgtatgcgcacttcatccagcaaatacgagccgtccggcacatatttggtagaagaacaggaagccaacaaaagtacgatagtagtaagtatcgcgtagcggaaacctttattcataccgagtcattaattgcgcataaacagctacaaatatacttgtatttttttgttcccgaaataaaaaacgccggaagagtgcagagtttttgattatattgaaataatcacgtatttttgtcaaatgataacatgtgtgtcctatggcattaagtaaaaatcgcattaaatatatccactcgttggagcagaaaaagaaccggaaggccgacaaggtatttctggcagaaggacctaaactcgtaggggatttgttgggacattttccttgtcagttcttgctggcaacttcagaatggctttcccggaaccgccctctctccaccgtaacggatgtcacggaagtatcggaggaggaactttcgcgtgccagcctgctgaaaactccccaacaagtgctggctgtgttccggcagccggatgaggagacggatatttccgtcatcagccactccctctgtctggctttggatgatgtgcaagaccccggtaacctgggaacgattgtccgccttgctgattggttcgggatagagcatattttctgttcgcccaacacggtggatatctataatcccaaaactgtgcaggcaacgatgggaggtatcgcacgcgtcagactgcattatactcccctacccgagttcatccgctcactgaaggatattcccgtttacggcactttcctggacggagagaatatgtacggacaaccgctttcgaaaaatgggctgattgtgatgggtaatgaaggaaatggcatcggaaaagaagtggaggcactcatcaaccgcaaactatacataccgaattatcccgccagccgtgagacctcggagtcattgaacgtggctattgccacagcagtagtttgcgctgagttccggcgccaggctgcattgtagtaaaatcaaaaggaaaaaacaaccagggaatcaaataaggcaattcttcctcgataaccggagggattgccgtcagtatattgcagcacgtatcaaaatgaggatagtctgtttccacctccgtaagcaaagctatgactcccggtagccattccgtattctccacctcttctgtcaatgggaagatacgtgatacacattgtccttcacctatctccaccacatattgtttcagatagccatgcccgggaagaaacagaaaatgggaagcgtagcgtttcatgctttcggacggggacgtatggttctgggagtcgtggtattttcctgctcctgaatttccagaggtttcaatttctcaggttttccgatactgtctttgcgaagggagtctgtcgcctgctgaaggctgtcctttggggcaatgaccaagctgtccgtggcgtgatagcgcatcagtgagatacggtctgccagcaaaggctgtggagtctcctgctgcggataatagatgaacccgcgtatttccttgatttctcctaaagtatcggcaaacaaggtgagcgtttccacacctgtgtcttgtactttccgaatggcactgatgacactgtcattcttttcgtaaagaatctgcatcgccatcaacggagcatgtatgctgtccggtgcaccgttgtggaaacggaagcgcacgctccagcgcagcgtgtcacggtcgtggaaattggtgtctgatggcaacgtaaacgttatcttgttgtccaggggcatacccgtcaactgatagatatgctgccatatccacacgtcgatactgtctccgggaagtgattctttcggcttgttgtcacgcagggcaatcaagtggttgataccgtctctctcggctttcaaccgtacattcactttctcgtagattttggtaagtacttccgggttacgggcaaaccagaccatagaagagtcaaaatcggcctgagtaatgccatatttcttgaaaaccgattcaatgtatagcacccgcttataactttcgttatacggcacttcttcacccatagctttggctatgtgataatcataaagcacgttttccatcttggcatccggaaggacggtttcaggtcttttcaccttacaagccgtcagactgaacgccagaaggactacgctacaccattgaattcgatttattcctttcatttataatttattcctctaacattagttaaggatataactatttcttatttttctttattttgccaataatatatacagtaatccctatcaaaattagaatgcaaccttgcattaacatgtctacaaataacttgatatcattaaatatataaccaatgagccaacctaatgcgatacaagtaatgccaatttttattccgttctttccgattttcgttaaattaggagttacagtatgaaaaacttcattcaaatatttgctatagaataacaatagtgagataataccacaacttattgctgcatcagcaaagttaaaaatcggactaaagaaaataaaatgctgtccaccgataaatggtagccactggggccagttagtatcaatgatagggaaataaaacatatctactaccttaccataaaataaggaagcataccctcctccttcaggtagaaaagaggctatctgggaatgagtactttcattaaacagtacaccataaaatacactatcaattatatttcctaatgctccagtaaggataagtgatatacagattataaatccagttttaacaccttgttttacaaatttatataagaaccatcctatgattgttacagcaacaatacgaaatgacgtcaaaaacagctttcctaatatttccataccgaaagccataccattattttctgtaaagtatatataaaaccaatctgtgacacgtatactttcgtgccaatacatatgtgtttttatccatacttttattatctggtcgataattaataccgaaaaaataacaagtaacgcaattcgacttttggtgaaaaaattacccatttctatttcttgccgttatttttagcttctatgcttaaggtagcatggggcacagcacgtaagcgttctgccggaatcaacttaccagtttcacgacaaataccgtatgttttgttttcaatacgtactaaagcagcttgtaatccttggatgaactttagttgacgctgtgctaaacgtgttgtttcttccttagacaaagtattagcgccctcctccaacactttataagtaggagatgtatcgtcggtatcgttaccatctgcacctgttaggctggcctttaatagttcatagtcacgttgtgccaattccaacttttctaaaatgatagcacggaattcttccaattctgcatctgagtatcttgtcttttctgccataactttacatgtttaattaattattctttaacaatgctcacatggagtttgaagttttcaaactctatttcggtaccattttcaataaaatccttaagttctagagaagtccccaaaacttggttacaaatatagtctttattattaattactgcactatctgtttgtggatttttagatagtgttatttttattttatcagtaatttcaagaccacttgatttacgtatattttggatacgatttactaattcacgagcaataccttcaaatcgaagttcttccgttatctcaatatctaaacctactgttagattaccattcgtcattgtcaacatgccaggagcgtcttctgttaatatttccacatcactaagttctataacagcaactgtatcatttattttcaaagagtatttcctttctgattcgaattttaatatttcttcttgagaaagttcttctacagctatagctatggacttcatcagtttgccaaacttgggccccatctttttataatcacatttgacgcgttttataatcatcccaatagtattactactcattaatgttaaggatttaacattaacttcagcctctattaaatgctttactgcgttaagacgtctttccatatcctcatttgtgataggtatccatgctgtgtataatggctgacgaaccttaatatctgctttgcggcgcaatgccaataccatggaagtgacgtcttgcgccatctgcatacgggcttccagttccttgtctatcatttcctccttatactcggggaacttggcaaggtgtacggaaacgacgttgtcgcgtccggtaacttcggtcaggtcggaatagagcatatcagcatagaacggagcgatgggtgccatcagcttagccacggtttcgaggcatgtatagagtgtctggaatgcagagagcttgtcctgcgtcataccaccgccccagaaacgtttgcggttcaggcggacataccagttggagaggttgtcattcacgaattcggaaatgagacgtcccgcctttgtgggttcgtattcattgtagcaggtatccacgttcttcaccagcgtattcagcacggagagaatccagcggtctatctcgggacgttccgtcatgggcacgtcggcttccttgtattcaaattcgtccacattggcatagagggcgaagaatgaataggtgttatagagtgttccgaagaacttgcggcgcacctcttccacgccatccacgtcgaacttgaggttgtcccacggagaggagttggtaatcatgtaccagcgcaacgggtcggaaccgtatttctcgatggtcgagaaggggtctacggcattgcccaagcgcttggacatcttgtttccgttcttgtcgagcaccagaccattggagatgacggctttgtaggcggtgctgtcgaacaccatcgtggcgatggcgtgcaacgtgaagaaccaaccgcgtgtctgatccaccccttcggcgatgaaatcggcaggatatacctggtggctatccagcagttccttattctcgaacggatagtgtatttgtgcataaggcatggcaccggaatcgaaccaaacgtcaatcaagtccgtctcgcgtttcatcggcttgccgtctttggaaacaaggatgacatcgtccacgtaaggacggtgcaggtctatcttgtcgtaattctcttcggtgtatacgcccggctggaagcctttgtccttgtaggggttggactgcatcaggccggcagccacggatttctctatttcgttgtagagctcttctacagactcgatacatttttcctcgctattgtcctccgtgcgccagatgggcagcggagtaccccaatagcgcgaacggctgaggttccagtcattcaggttttccagccacttgccaaaacgtcccgtaccggtgctttccggcttccagttgatggtcttgttcaactctatcatacgttccttgcaagcagtgctgcggatgaaccagctatccagcggatagtacaatacgggtttgtccgtacgccagcagtgcggatagttgtgtacatgcttttctatcttgaatgcctggcgggcggctttcatcatcatgcagatttcaatatccagcgattcggcagcttgtgcggcttgttcgtcgtacttgccgtctacagtgaattgggggtcgtaggcattcttcacccacttgccctgatagtccttatagaggtccacgttgacacatgcctttacgaaatcctcatccagttcatctatcagatagaacttaccggtgagatccaccatcgggcgggtttcacctttcttgtttatcatgaacagggaaggtatgcctgcagcacgggccacaaaggcatcgtccgcaccaaaggtcggggcgatgtgtacgatacccgtaccgtcttcggtcgtcacataatcacccgcgattacgcggaaacctttgtcgctggcagtccaactgccgtcttcggccacgtctatcggcttcacccacgggatgagctgttcgtactccatgcctatcaggtccgggcctttatattcgcccaccaccttgaacggtatcagcttatcacccggcttatagtcctctaatgcaatgccttccgcttttttgttgaagtgggtatagagcagcgcctttgccaggacgacggtcattttctcgccgctatagccgttgtaggtctgcacggcaacgtagtctatcttaggccctacacagagcgcggtattgctgggcaatgtccacggagtggtagtccatgccaggaagtagggagtcccccactctgccatttccggcttcgggttctttatcctgaactgccccaccacggtcgtgtctttcacgtcgcggtagcatccgggctggttcagctcgtgcgagctgagtcccgtaccggcagcgggagaatacggctgtatggtatatcctttataaagcagtcctttcttgtagagttgcttcaacagccaccacaaggtttcgatgtagcggttgtcgtaagtgatgtaggggttcttcatgtccacccagtagcccatcttgtgagtcaggtcttcccactctttggtgaacttcatgacgtccttgcggcaggcggcgttgtattctgccactgaaatggtcttgccaatatcctctttggtgatgccgagcgccttttccacacccagttccacgggaagcccatgagtgtcccatccggccttgcgctttacctgaaatcccttcattgtcttgtaacgacagaaaatgtccttaatggagcgagccattacgtggtgaatgcccggcataccattggccgagggaggtccttcgaaaaacacgaaagaaggacaaccttcacgttctgtcatactcttggcgaaaacctggttttcgtcccatttctccaacactttcccgttcacatcggaaaggtcaagcttcgaatattcggcaaacttcttacccatcttgatatttactatttgacaatttacgattgaagatactcttgactggcatatttcttggtacgtcaaaagccatcttctctattttaagggtgcaaatttacaaaaaacttagatacaagagactttttaggtggaaaaagctggctaagtgcgataaaatgttttatttggcgtcagttcaatggatgtgggggtaatattcgtttgatatgacctttctaaaaatccccaaaatgcacgggtcccctaagcaaaaaacggcaaaaaacgtaaatttagctcaaacaagcgacctgaaaactacaaatgagagggatgttttgctgagttcaacaaatggtatgtagaattctgcgaatgccattgccgctatcggcaatgggcgtgcagggaacagcacgcgaaagaataatacaagtattataaataaagaaataataaaagcatcggcggcggttgtcaatcaactgccgttgctgccatgagtataatataacgtgaattcgttgaggtaatggttcaccactccgaagcaatccagtgcctcgtcaaaggagaggaagtaatacatcaggttctcaggtgttttctttccggtcaggacttcgtccacataagccagaaaggcgttttttatgctgttgtcatcgtagtagtccgtcagctttgccagcttgcgctctatgggcttgttgtgcagcaattgtatggcgattttggtacgtttgggcttcaccttatcggtcagtcccccgtcattgtagtattggcggcgcttgtcatagacctcgttcagcagccggtagattcggtcggcagccttgcggtcgatggcggcgacaggcttcaacacctcttccttgctcttcttctgcatgatggcgtggtagtcaaagtagctcaggaagttgcggaaaagcgtgcttccgagcacgatgagttccagcaggacatccgcgtcggcaagtacgctgaagtccacggagtaatagcggacacgcccacgggtgacggaattgacctttatgtcggttttcaggaagcccaggccggagaattgcttgatgatgacttcctgccgggtgcggcggatacgggtttcctcctccacacgggcttgggagtaatggaaaggcttgtatttaaaggcaatctgtttcaccacgagccaatcgaacagaatcagttcgtcgggagccatgcggtagtccagtaatcgcaacacattggtacaaagaggtatttcgggagcggagacagttttcttggccatcgttttgtttttttagagtaaaatcgtgtaaagatacggataagcaatggaattaccatccgaaatgccacacttcatcatcccgaatgccacacttcggcaactgaaatgccacacttcgttgtccggaacccgtggcattcgggatgctaaggtgtggcattcgggacgatgaagtgtggcatccggaagggggtcatttcttcattttcacctcgtacaaatcgcctctccggtctttcaggttgcgtacactgccgtaggtatgcagttcattcagcaagtccagatccacatccgacacaagaatcatttcggtattcggagtggcttccgcacgcttgccgtctgtggggaaagcgaagtcgcagggagtgaacacgccggactgggcatactggatgtccatgttgtgcacgcggggaagattgcctacactgccggctatcactacaaagcactcgttttcgatggcacgagcatgggcgcacacctttacgcggctgtaagcattctgcgtatcggtaaggaaaggaacaaagagtatctgcatgccttggtccgccatgatgcggctcagttcggggaactctacatcgtagcatatcagcacgcctatcttagcacagtccgtatcgaaagtttggatggacttgcctccgctcagtccccaggactttatctcgtcgggagtgacatgtatcttttcgtacatttcataacttccgtcacgtcggcagaggaatcctacgttgtatagcagcccgtcttccttgataagcggcatactgcccgtaataatgttgatgttatagctgatggcgagcttgacgaaacgctccttgatttcctcggtataggccgccagcccgcggatagcctgcgactcgccctcgttgttgaattttgccatcaacggtgcgttgaagtattcgggaaaaaggacaaagtcactcttgtagtcgctcacggcatccacaaaaaattccacttgctcaaaaaggtcatccagtgtcttgtaggtacgcatctgccattgtaccaagcctacgcggacagtggttttggggtttacatagtcttgtgtgggagcctgatagtagatattgtcccattgcagcaggcaggcgtagtgcttggactcctcatcattgggaaggtagttgcgcatcaccttgcgcacgtggaagtcgttagagagctgaaaggtcagcaccgggtcgaagatttccttttgcttcaccttatctatgtactccttggggcggatttgatcggcatatttgtagtagttggggatacgtccgccaaacatgattgccttcaggttcaatgtctcgcaaagttccttgcggtattcatacatacggcgtgccagacgcaggccacggtattggggatggataaagacttcgatgccataaagtatgttgcctttcggattgtgggtgttgaaagtctccttgcccgtaacctgggcgtaagtgtggtcgttcttcacatcatcgtagttcactatgatggaaagcgcacagcccacgattttctcgtcaaccaccgtcacaatctgtccctcggggaagatgcgtatcagtttttctatttgtttgtgcgtccagaacacatcgcttccgtctgaataaacgcgcgtaaacgattgtgccaactggtcataatcttcaatctgcagattgcgtatctgcaccttattgattttcattgaatccataactttcttgctattcctgattaaaaacagtgcaaaggtacggtttatccttacatgttatcttcccctccgaagatttttctttcccatcttgaacggataagggaaaagatacggaattgataacaaaaagaggaggcattcatcaggcctcctctttcccgtcttatatggacagtttcaatgacggtcttatctattgtttcttctattcttccacagcttggtcatgtcttccagtgtcttgcctttcgtttcgggaacaagcttccagacaaacagagcagccaccacacagatgattccgtataaaccataagcaaacatgtgcccgaacttgtctcccatatctcccaaactcatattgtacataggtacgaaggtggaagatacaatgaaattgaatatccattggaaggctacggcaatggctactgcagcgccacggatggtattcgggaagatttcagcaatcagtacccagcagatggggccccagctgaacatgaacgaagcactgtagaccatgatgctgacaacagccaacatgggaggaagccctgccacaacgttgcaaagagctactccgaaagcacctatcgccatgccgatagaccccgagatgagcagcggtttacgtccccatttctcgactgtaaagacagccagcaacgtgaacagaatattgatgatacccatgatgacggtttgaaccatcgggttgcccattcccatcgtttcgaagatacgcggtgcgaaatagagtacggcgttgatacctaccgcttgctggaatacactcagcatgataccgataaagataaccatccagccataagtgaaaagcttttccgtcttttcctctgccgtggctttgatttgagacagaataacctttgcctgagccaagccgttgatacggcttaacacctggagtgccttatcatccttgccactcatggcaagatagcgtggcgtttcgggaacaaacagtacgagcaacgcaaagactcctgcaggaacagcctcactgacaaacatcagacgccatcctatctctgtggtccatgctgccgcttcgggattcagaatctggttgactccttcaatggcctttatcaccggatttgaattctcgcccagaataaggaaattcacgaagtaaaccaccaactggccgaagataatggcaaactgattccatgataccagagtcccgcgaatgttgctcggcgcaatttccgcaatatacatcgggcagatggccgatgccaaacctacgccgattcctcccaatacacggtagaaattgaatgccacgagcaaggaataggaaggaacaccatagtcgaagaaaaggaattccgggtagtaggagcccaatgccgacagaaagaacaagacgccggctatgaaaagagaattcttacgtcccagattggatgcgaagaatcccgaaagagcactaccgatgatacatccgataagtgcactggaagaggtaatgccgtgaatcgtatctgtgtagacaaaatcggaggcacccataaaaaatgcctgaagccctttatcggcaccggatatgactgctgtatcgtagccgaaaagcaagcccccgatgacggctaccagcacaatagagaagaggtagagtttactgcctttttctgtataattcatgatattaatgattaatggttaatgattagcgattaatgattagcgattaatgattaatattgaaacacctcatgcgcaacttattaaccactaatcactaaacattgatcattattagcagtacatattcacgattgcctcatacaattcctgcttgccgctggtctgtttcggctcaccgttggcttttgcgtaagctaccaaatcctccagcgtcagtttgccatcttcaaattccttgcctttgccgctgtcgaaggaagcatagcggtcggccagcatcttcttgtaaggagactcttcaagcaatttggctgcactttccagtgcacgtgccatcacgtccataccggcgatgtgggcaatgaaaatgtcttccaggtcggtggagttgcgacgggtcttggcatcgaagtttgtaccgccattgccaaagcctccgttacggatgatttgcatcattgcctgggtcagttcgaagttgtcaatggggaactggtctgtatcccagccgttctggtagtcaccacggttggcgtcgatggagccgagcataccgttgtctacggctactgcgagttcgtgctcgaaggtgtggcccgccaaagtagcgtggttcacttcgatgttcaccttgaaatctttgtccagattgtgagccttcaagaagccgataacggtttcggtgtctacatcatactggtgttttgtaggttccatcggtttcggttcaatcaagaaggtacctttgaagccgcgggcacgtgcatagtcgcgggcgatggtcaacatctgtgcgaggtgctctttctcacgcttctggtctgtattcagcaatgacatgtagccttcgcgaccgccccagaatacatagtttgagcctcccagttcgatagtagcgtcgatggcgtttttgatttggatggcggcacgtgccacaacatcgaaatcgggattggtggctgcaccattcatgtagcgggcatggccgaatacgttggcagtaccccacaacagtttgatgccggtttctgcttgtttctgcttggcatacgctacgatttccttcaagttggcttcgtattcttcaatggtctcggcttcttcgcagaggtctacatcgtggaagcagtagtattcgatacccattttctgcatgaattcaaagccggcgtccattttgttcttggcagcctgaaccttgtcagcctcaccgttccaggggaatttctttgttccgccaccgaattggtcaccaccttctgcgcaaagagtgtgccaccatgccatggcgaacttcagccattcgctcattttcttacccatgattactttatcggcatcgtaataacggaatgccatcgggttcttgctctctttaccttcgaatttaatctttcctattccgggaaaatactcttttgttgccataagaatttaatgttttaatgtgagaatgtgccaatgacagacacattcatcacggggttaattattaatttattgttttaacgtgctaacgttttaatgtgcacattagcacattacccagtgtttccagcgcgcatatgcgtcggcataagcctggcggtctgccactttcggctctatcacctcgagcttctcaagcgtggcaaatgcttcgttgttgtccttgtatatgcccacaccgattccggcgcctttggcggcacctacagagccgtcggtatcatacagttcgatgacagctcccgtcacaccggccaatgtctcgcggaacagcgggctgaggaacatattagccttgcctgcatgaattttctgcacgggaatgcccatttgttccatgatgtcgattccatatttaaaggaaaaaacgatgccttcctgcgctgcacggatgatatgctgtttgccgtgctggttgaagttgatgccatgaatggagcagcctatttccttgttctccagcatacgctccgcaccgtttccaaagggcaggatactgataccggcactgccgatgggagcttgcgccgccagcagattcatatcgctgtaggagatgccttcgggagcaacggtgcgttttacccatgaattgagaatgcccgtaccattgatgcacagcagaacacccagacgggtttgcccggcagcatggttgacgtgtgcaaaggtgttgacacgtgacttggggtcgtagttcacctcaccgttcacgccgtataccacgccggacgttccggcggtagaagcaatttcacccggattgaatacattcagggaaagggcattgttgggctggtcgccggcacggtaagtgataggcgtaccttctttcagacccagctctgcggctgcagcagcattgacacgtccctgctcggagaaagtcggtttgatgtcggcaatcagagaggagtcgaatccataatagtccatcagaaagtcggcaacccggttgttcttgaaatcccagaacatcccttcggacaaaccggacaccgtggtacagatggtaccgctcaacctcatggcgatatagtcgcccggcagcattatcttatgaatcttttcgtaaacggaaggctcattctccttaatccaagccagtttggaggccgtgaagttgcccggagaattcagcagatgtgaaaggcaagtctcctctcccaatgtttcgaaagccttttgtccgtagggcacggctctggagtcgcaccagataatggcaggacgcaacacctgctggtttttatctacacataccaagccatgcatctgataagagataccgatcgccttgatgtcttctgcgtttactccggattctgccaataccgcttgtgtggccagtttcaagttttcccaccagtttccggggtcttgctctgcccagccgggcttcactgcgataatttccgcttcagtcttggggaagaaggcagacgatacacacttgccgctttccgcatttactagactcgcttttacagacgagctgccgatgtcataacctaataaatacatttttatcaatattaaaatgaaagtgatatgaagaatttacaatccggctaccgtcggattttattgtatatctttttgtcgaaacggtagtaacgtgccgcccggtgggccacgccctgctgtttttcttccagggggacgacatactccatcaaggcaatttttttatggaaattgcgtacgtcgtactgcttgtcatacaccagttcgtacaaagtgcgaagctgggatgcggtgaacttacgcggcaacaagtcgaacagtgaagacgggttgaactcgacgtactggcggacataggtaatggcttccttgataatcaggttgtggtcgaatgccagagcctttatatccggcatggctacccaactggcttgataattgtccaaatcacggttcaatgcgcggtctatcttcaccagggaaagataggctatggtgacaatacgctccaccctggactgcatggcacgttccagccaatgtacatctctggggtctttcgtacggttttttgagccgaatgccttgaattgcatcagattgacgttcttcagacccgtcaattcattcaacacccgtttggcagcttcatccaaatcctcatccatgtaaatcaaacttccgggaagcttcatatcatgaaagatttctccttcttcctctcctgcacgcttaatcagcagaacctttagctgttctccgtcaaaaccaatcactacacagtccacagagatatgattgtttgccaacggcgttttttgttctatgttttgcataatatatctcgttaagcgctgcaaatataaataggtttttctaatttgcaataaaggaaaagaatatttttataatgttataaagcattatttttcaactgaatacatatcttactttatacaatatcattttcagttgttatcgtatggaatacaatatgtaatttacaagaatacacaagaggtctaattgtaggaagtacaataaggaggaagtgtttcatttataagtatttcagtatccggataccacagaagacccaagcatacatattgtattttagcttcccccttaaagtaagggtattgcacaaaaaacatccgtttgtgcggtgaatatcagaaaaacctctacctttgcagcactttttatttaaacactaaaaaacgagtaaatatgaaagcatttgtatttccgggtcaaggtgcccaattcgttggcatgggaaaggagctgtacgaaaattcggcattagccaaggaactttttgagaaagcaaatgatatcctcgggtatcgtattactgatattatgttcaacggaacagatgaagatctgcgccagactaaagttacccaacctgccgtattccttcattccgttatttccgccctctgcatgggcgatgactttaagccggagatgaccgccggtcactcactgggcgagttctccgccttggttgctgccggtgcactgagctttgaagatggtctgaagctggtgtacgcccgtgccatggctatgcaaaaggcttgcgaggcacagccctccactatggcagccattattgccctgccggatgaaaaggttgaggaaatctgcgctcaagtaagtgctgaaggtgaagtttgcgtggcagccaactataactgcccgggacagattgtaatttccggttccatagaaggtatcaacaaggcttgcgaactgatgaaggctgcaggtgcaaagcgtgctctgccgttgaaggtaggcggtgcgttccactctccgctgatggaccctgccaaagttgaactggaagcagccatcaatgcaacagaaatccatgctccgaagtgccccgtatatcagaatgtagacgctatgcctcatactgacccggtagaaatcaagaagaacctggtggctcagctgacagcatcggtacgttggacgcaaacagtgaagaacatggttgccgatggtgctacggacttcacagagtgcggtcctggtgcagtgctgcaaggtcttatcaagaagattgcaccggaagctacggctcacgggattgcataattccttaaatagaatattttcaaggctgtctttcttcaaatagacagcctttcttgttttagtaggccatttcctttatatttgccactcacaacaaaatgggatatatggaaaagattacggagttcagaaataccttggcagtacctattcataagttatcgatagactctctggtacaagaggtatgcctctgccccgagtattttgaagatatataccgattgacatacgatgaaaaacagacggtgtcatggcgggcaatatgggtatgcgagaaattgagcgaaatccatcccggctggttcatcctactgtacgatgaaatcattcaacggctgatagactgcacgcacgacggttccaaacgtctcttattatctatactgtataatattcccatccctactccaatctccgtcgatttgctgaattactgcctggaccacatgctatctccgcaagaaagcataggagtgcaagccctttccatcagaatagcctatctgctttgcaggaaggagccggaactgctgcaggaattgcaactgatactagaaaatacagagcttgatttttattcaactggagtcagaaccactgttcggaatacgctgaaaaagatacgtgccacaaaggggcgcgagtaaacaaaaagtaatcactgaaataaaaagtacgttcttttgttttttatttccgattttcccttacctttgttgccgtaaagacaaaggggtgccccgacgggctgagattataccctcgaacctgatgcagttagtactgccgtaggaattggatatttctttcttcactgaacttgccgtaaagacgcttctttgtatttacttccattgttttatttcttaatgaacagaaaaatgaaagtattggtcaacaacaaggaagtgaaaaccggcgccactaccctttcacaacttatcgaggaacttgccctaccgatgcaaggcattgccgtggccgtagacaaccgtattgtacttcgcacggaatggacaaaatgcatcctgagggaatacatgcccatcatcattatcaaagcagcttgcggagggtgaggaagatgaaggacgagagactgaaaaacggaggaatgcagttcatcacgcactatacggaacgatattcgtatctggatgctgcacgcatggctcttgagggcggttgccgctgggtgcaactgcgcatgaaagacaccccggtggaaacgatagaacccgtagctttggaagtgcaggccctttgccggcaatacggtgccaccttcatcattgacgaccatgtggaactggcaaagaagctgcatgccgacggcgtacatcttggaaagaaagacatgcccatagccgacgcacgccggattctgggcgcggagtacattataggcggtaccgccaatacttttgaggatgtactgcaacactacaaagccggtgccgactacataggctgcggccccttccgctacaccactaccaagaagaatctgagtccgatattgggactggaaggatatacagctatcatccaccggatgcaggagaaggatatacaccttccgatagtagccatcggtggaataaccatagcggatattccagccgttatgcagacgggggtaagcgggattgccctttcgggcacggtactgcatgccgatagtccggcagatgaaatgaaaagaatcatttctttaatggagaatgaaaaataaagaattaatagatgacgactgatatggaaaaattagtgattgcggaacgtgagttcaactcccgtctgtttttaggaaccggaaagttcaattccgatgaagtgatggagcagtctatcctggcatccggcacagaaatggtgacggtagccatgaaacgcattgaactggacaacaaggaagacaatatgctggtacacatacagcatcccggtatccagcttctgcccaacacctccggcgtgcgcaatgccgaagaagctgtttttgctgcacagatggcgcgtgaagctttcggcacgaactggctgaaactggagatacaccccgacccccgctatctgttgcccgattctgtagagacgctgaaagccacggaagaactggtcaagttaggatttgtggtactgccctattgccaggccgaccccacactgtgcaagaggctggaagaagccggtgccgccaccgtcatgccgctgggtgctcctatcggtacaaacaaaggactacagacaagggatttcctgagaataatcattgaacaagccaatatccccgtagtggtggatgccggtatcggtgccccgagccatgcggcagaggctatggaaatgggcgcttcggcttgcctggtgaatacagccattgcagtggcgggcgaccccgtgaccatggcggtagcgttcaagcaggctgtagaggcgggacgcatggcatacgaagcaggtctgggcatacaggcagataattttgttgcggaagccagctcaccgctgacggctttcttgaatgaaaaatgacaaaacagggagatttacgattagacaatttacgatttacgattgaagttactcatgcaatcataaacctaccggttgagagaggttgtttaacaatacaaactccaatcgtaaatcgtaaattgtctaatcgtaaatctctacataacaaaacctaaagaaaaatgaaccagaagataaaattcccccgttccgagaaagtatatttgccgggcaccttgtttcccgaattgcgcgtagctatgcgcaaggtggagcaagtgcccagtacgaacttcattgatggagaaaaggtacttactccgaatccggaagtgtatgtgtatgataccagcggaccgttcagcgaccctgccgtcgaagtggatttgaagaaagggctgccccgtctgcgcgagccgtggatactgaaacgcggcgatgtggagcagctttccgaaataacgtcggagtacggacgcatgcgccgcgacgaccagtcgctcgactctctgcgctttgagcatatcaccctgccctaccgcgcccttcaaggaaaatgctgcacacagatgtactatgccaaacaaggtatcatcacgcctgaaatggagtatgtggcgattcgcgagaacatgaactgcgcggagctgggaatagagacgcacatcacaccggaatttgtacgccaggagattgctgccggacgcgccctgcttcctgccaacatcaaccatcccgaagcagagccgatgattataggccgtaacttcctggtgaagataaataccaatatcggaaactccgccaccacctcgggcatcgaagaagaggtagagaaagcattgtggagctgcaaatggggcggcgacacgctgatggacctctccacgggcgagaacatacacgaaacgcgcgaatggattatccgcaactgtcccgttcccgtgggcactgtccccatctaccaggcattggagaaagtgaacggcaaggtggaagacctcacctgggaaatctaccgcgacaccttgattgaacaatgcgagcagggagtggactacttcaccatccatgccggcatacgccgccacaatgtgcatctggccgagaaaaggttgtgcggcatcgtgagccgtggcggcagcatcatgagcaaatggtgcctggtgcacgaccgcgagagtttcctttacgaacactttgatgacatttgcgacattctggcacagtatgacgttgccatctctttgggagacgggctgcgtccggggtctacgcacgatgccaacgatgaagcgcagtttgcagaactcgacacgatgggcgagcttgtgctgcgtgcctgggacaagaatgtgcaggctttcatcgaaggtcccggccacgtgcccatgcacaagattaaggagaatatggagcgccagatagaaaaatgccacgatgcgcctttctatacgcttggtcccatcgtgacggacatcgcaccgggttacgaccatattacgtctgccatcggcgcggcacagataggttggctgggtacggccatgctctgttatgtcacccccaaagagcatctggcgctgcccgataaggaggatgtgcgtgtaggtgtcatcacctataagatagccgcccatgccgccgacctggcaaaagggcatcccggagcacaagtgcgtgacaatgcactgagcaaagcacgttatgaattccgctggaaagaccagttcgacttgtcgctcgacccggaacgtgcgttcagctattttcatgcagggaagcatgtggatggggagtattgcacgatgtgcggaccgaacttctgtgcgatgcggttgtcgagagaattaaaaaagaaataaatgggaattgatagaacactatgttttcagacgaattagaacatatatcctgggaggaaaccacggcacgcatccatgccaagacagatgcggatgtgcgccgtgccctctccaaagaacattgtaatgtagaggacttcatggccctcatctcacccgccgctgccccctatctggagacgatggcacgattgagcaagaaatacaccgaggcacgattcgggaaaaccatctccatgttcgtgcctctttacatcacgaattcctgcaccaactcttgcgtgtattgcggtttccatatcagcaaccccatgccgcgtaccatactgacggaagaagaaatcgtgaacgaatacaaggccatcaagaagctggcacctttcgagaatttgctgttggtgacgggagaaaatccggccaaagcaggcgtgccctacatagcccgtgcactggacctggcaaaaccctacttcagcaatctgaaaatagaagtgatgcccttaaaaacggaagagtatgcaacgctgaaagaacacggcatgaatggcgtgatttgttttcaagaaacctaccacaagtcgaattacaacatctaccacccccgtggcatgaagtccaaattcgaatggcgtgtcaatggtttcgaccgcatggggcaggcaggcgtccattccatcggcatgggagtgctcatcggtctggagaaagaatggcggacagacatcaccatgatggcttatcacctgcgctatctccagaaacattattggcaaacgaaatacagcgtcaacttcccccgtatgcgtccttcggagaacggcggcttccagcccaatgtcatcatgagcgaccgcgaactggcacaagtcactttcgccatgcgcatctttgaccatgatgtggacatctcctactccacccgcgagcctgccgatatacgcgaccatatggcaacactcggtgtgacaaccatgagcgccgaaagcaagaccgagccgggaggatattacagctatccgcaaacgctggaacagtttcatgtcagcgacgagcgcaaggctgtggaagtggacaaagcattgaaacgcctggggcgcgaaccagtgtggaaagattgggatgcgagttttgatttgaaggctttcaagagatgagtggccgaatacagaaccttaataataatgaacaaatgaaccgatatgccagacaaacgtccctccctgaaataggcgaagccggacaagagaaactgcgtaatgccaaggtgttgatagtcggtgtgggaggattgggttctcccattgccctctatctggcgggagcaggagtcggaacgctgggattggtggacgatgaccaggtcagcatcagtaatcttcaacgtcaggttctgtatgctgaagctgaccttgggcagcctaaacctctatgtggcgcccgtagagtgcagggtttgaacagcgatgtaaacgtggaagtataccccttccgtctggacaagaagaatgccggagaactgataaggaactacgatatagtggtagacgggtgcgacaacttcgctacccgctacttgctgaatgacgtatgcaacgcttggggcaagccctacgtttatggtgccattcaaggctttgaaggccaagtgtccgtcttctgctacggtgagggtgcaaaaaactatcgtgacctctatccggatgaagaagggacactgctcatgccatctccggacaaatcggttatcggcgtaacccctgccattgtgggtagcgtagaagccaatgaagtgttgaaactgatttgcggctacggtgaacccttggcaggaaagctatggacgattgatttaagaaccatgcagtcgtatattctctcattatagacaaacatccataaagatatgaaactgatagtcattaccacgccgcaattctttgaaggagaagcagcggcagttacctccttattccaaaacggtttggaaatactccatctgcgcaagccgggagcttcggcagaagagatggagtatttcctgcggcagttgccgatggaatatatgccgcgcattgtcacgcatgagcaattccagctggcatccgttttcggtctgaaaggaattcatctgaacgggcgcaatccgcagataccgttcggatataagggacacatcagttgttcctgccactctcttgaagaagtgttgaaacataaatcagattgtagctatgtgttcctcagtcccatttatgacagtatatccaaagaaggctactcttccgcttactcctgcgataccttgaagaaagcacagcaagcaggtatcatcgattccaacgtcatggcattgggtggcatcagcctggagcatcttccggaaatagccgttttaggtttcggaggtgccgtcctgctaggagacatctggcagcaagcgaaggaagatttcatcccccacttcctccacctgaaacagctctcctcccccctttaatttttaatttctaatttttaattatttcatgcttccccctattatcctttccattgccggttccgactgttcgggcggtgcaggcatacaagcagacataaagaccatttccgctttgggaggttatgccgcttccgtcatcacggctgttactgcacaaaacacactgggagtacaatcggtttatccgatacctgcggatatggttaaggcacaaatcacctctgttatggatgatttaaggccggatgccgtcaagataggtatggtacatgatgccggtattgtgaccaccattgtcgattgtcttcagacttatactccggagtgtatagtctatgaccccgtcatgatatcgaccagcggacggcgactgatgaccgaagaaaccatacaagtcattaagacggaactgtttccgctatgcaccctcattactcccaacctgaatgaagcaagcctgctttgggggcaaaccattaccggtactgtggagatgcgacaagcggcacaggaattatcctgcagatacaacaccgctattctcgtcaaaggcggacatctagaggataatgacatgtgcgacgtgctttattgccggcaaccttctgccggggctgacatcctgccatccggatgcatcctctattccaaccccaaaatagagagccgtaacctgcacggcacagggtgtaccctttcctctgccatagctacatttcttgccggtggcaacaaactcgatgaagcggtctgcaaggctaaagagtatatcggtactgcgataaaccgggggaaagacatgaatatagggcacgggaacggtccgttatggcactttcctttatcggaataagagctcgtcgaaacgcattatctgtttaccttaaacgcattatctgtcagcctccgatacatcatgtgtttggcaccaacggacaatgcgtttcgacatgtctgcttcttaatagcgtatgcccagaattttcttggcatcgtctttcttaaacagtgaatcaatgacgtctaaaatcgcttcgtagttttccggatctacgatattgggagcgaatatgttgaggactttcatcttgtcgtcatcaaaagtatatagtgccatcaaactggcacattgcacacagttcagactgttgtttcgggcaacagttctcatcatttcgatttgatcatccttgaaagggcgggacttcactttttcataaaaatgccggaagtcttcggggtgcatccccctgacataaaccggagctggagaatctatcactacttcactgggaacaaccggcaacgtacgtggctctccggagaatgagtccattgcaacgactctcccaccttcaaaagtcacgacaatctgagttcggctgatattacttttaccggacagcactctggaatattcccattcttctatatcccggtcgaagcggcgatactctggagttcccaatatcttggtgacctcctgcctgctcatccccttctggatactgttcaacacatctaccttagcatcataaaacaaactggaacaactgctgaatcccatcgtcattaccagtcccgcaataattagtctgattgttttcatcttatcgagtttttagttgccacaaaggtaggcagaaacatggatagacctcttattatccccctatttgtcaaaagggatttccctactttttttagccatatacctattaatatggaaataatccgttatttttgcagatactatcactataaataggtaaaaacacatggaaaaagcaaaagtatactactctgatttgcgtacctcccctacatccaatcttttggataaaatggaacgcttgctgaaaagggcaggcatcgagcaacttcctttgaaagatagctttgctgccattaaaatccatttcggcgaacccggaaacctggcatacttgcgtcccaattatgcagctcgaatggcaaccctgctccgcagcctgggagccaaacctttcttgacggactgcaacacgctgtattccggtcgtcgtgccaatgctgtagaccacttgcaaagtgcgatggagaatggctttaaccctatctcggcccagtgccaggtcattatcggcgacggactgaagggaacggactaccgcgaaatccctctgaacggggaatattgtccggcacccaaaatcggcacagcgatagccgatgccgatattgtaatcagtatgaaccacttcaaggggcacgaacaagccggttttggcggcgccttgaagaatctgggcatgggatgtgccagcgtaggcggaaagctggaactgcattgcgcctcgcaacccaagattgatgaagcaagctgcatcggctgcaacatctgcgtgaagcattgcgcacacgacgctgtgcacctcaatgccagccgcaaggcagaaatagactacgccaaatgcgtaggttgcggacagtgcgtagccctctgccagcacgacggtgccgtgatgggagccgaagatacttccgagcgcctgaactacaagattgcggaatatgccctcgctgtcgttatgggcaagccccatttccacatcagcttcatcatgaacgtatctcccgaatgcgactgctggaaccacaacgatgccgccatcgtgcccgacctcggcattctggcttcggcagacccggttgcactggacaaggcatgtgcagatatggtcatccaagccccgatactgcacggtaacaattgccttgccacggcacacgaacacgatgacttgtgtggatgcgacaagttccacttgatgcaccccgacacagactggcttgccggattgcgccatgccgagaaaataggattgggaaccatggaatatgaattggtgaagatttgattaaaccttttcagttttaaacagtcataataaaaatagatttatcaactataatattatacaaatggaaacatctgtaaaactttattctttgcctttcggcaacgtaaagacctatctattcgtcctgctgttcgtggcaggaaacatcgccttgccgcaactctgccatctggtcccagcaggcggtccgacgttgcttcccatctatttctttacactgatagctgcttataaatatggtttcaaggtaggtctgctgacggctctcttgtctccggtcatcaatcatctgctttttgccatgcctgcagcagccgtgttgccggccatacttataaagtccggtctgctggccggaaccgccgctcttgctgcacgctatgccaagaatatctctttattggcattgctgggtgtagtcctctcctatcaaattatcggtacggtctttgaatgggcgttgtgcggtaatttctttctggctgtgcaagatttccgtatgggcattccgggcatgctgattcagtggttcggaggatatgcactgctgaaagcaatcgcaaagaaataaacgtatattctcaaacagtatcccttaatcctaaaactttgttcgcacactgcggatacatatccccagtttgcggatgtctatcccaaggcttgggatagacatccgcaaaccataaacaaagttttttcttaactgataaaaactttttccctaactaagaaaaactttctccttaatagagaagacttttctcttaatactttgaacttttttccgctattttcctttctccctacaataaaatcattaatttcgtgccgaacaatatatcatattttcaacatggaagtagtaacgaacaactggttcactaaaaaatatccaataggttttgccttaagcggcggtttcatcaaaggctttgcccatttgggtgccatgcaatccttattggaacatgacataaagcccaatatactttccggagtcagcgccggagccttggccggggtattctacgccgacggcaatgaaccgcatcaagttcttgactactttgccgggcacaagtttcaggacctgaccaaactggtgattcccaaagtcggattgtttgaattgggagaattcatcgatttcctgaaaagcaatctgaaatccaagaaactggaagaactgcaaatccctctgattattacagctactgacctggaccacggacgcctggtacatttccataaaggggacattgccgaacgcgtagcagcttcgtgttgcatgccggtattgtttgccccggtcaatatagacggcacccattacgtggacggaggtctgctgatgaacctgcctgtctctaccctccgccgtatatgcgaaaaagtgattgccgtgaatgtcagccctctgatggcgaccaagtataaaatgaacattgtgagcattgccttacgctcctatcactttatgttccgctccaactcttttcctgaacgcgagaaggctgatttgctgatagaaccttataacttggagggatacagcaatacagagttggaaaaggcggaggagatattcatgcagggatataatacgaccaatgatatattggaacgtctgctcatagacaaaggcagcatttggaaagaataaaataaccattctataacatagaaaacaaagaaatgaacgacgaaaacaaattgattatttatcaagtgttcacccgactattcggaaacaacaataaccactgcatcaataatggcagcatcaccgaaaatggatgcggcaagatggctgactttacagccaaagcgttgggagaaatcaagaaacttggcgctacacatatatggtacacgggcatcatcgagcatgctacgcaaactgactaccgccgtcacaatatccaacccgaccatccggccattgtgaaaggtaaagccggatctccctatgccatcaaggactactatgatgtcgatccggatctcgccaaggacgtaccggagcgtatgaaagagtttgagaatctggtgcagcgcactcaccgtagcggtctgaaggtcatcatagattttgttcccaaccacgtagcccgtcaatatcactcggatgcccagccggatggcacttcacaactgggttcaaacgatgataccaattatgcgttcagcccatataataacttctattatatcccgaaatcggaactgcatggccaatttgacatgaaaggtgcagccgccgaaccttatagggagtttccggcaaaagctaccggaaacaaccgttttgacgcttatccaaacatcaccgattggtacgaaactataaagttgaattatggagtggattatcagaacggcgggacttgccatttcgaccccattcccgacacatggaccaagatgctggatatcatgctgttctgggcgggaaagaatatagacggtttccgttgcgatatggccgaaatggttcccgtagagttctgggaatgggcaatcccgcaggtaaaagagcaatatccctccctgctgtttatagccgaagtctataacccgggagaatacaagaattacttgttccgtggcaagtttgattatttatacgacaaagtaggactttatgataccttgcgggctgttacttgcgggtatgaatcggcaactgccatcacccgttcctggcaaagtctgggaggtatagaaaaacgcatgctgaactttctggaaaaccatgacgagcaacgtatcgcttccgacttttttgccagtaacccacgcaaggcgattccggcactcattgtgtcagcttgcatgaacaccaatccgatgatgatttatttcggtcaggagtttggtgagctgggcatggatagtgaaggtttcagcggccgggacggacgtacaaccatctttgactattggagtgtagatactatccgccgttggcgcaatggcggcaagttcgacggcaagatgctgacggaggaccagaaacacctatacagcatttataaacggctgctgactctttgcaatgaagaaaaggccatctctcagggggctttcttcgatttgatgtatgccaatgtcaacggatggcgctttaatgaacataagcaatatacattcctgcgcaaatttgagagagacctgctgctgttcgtcgtgaacttcgaccatatctcggcagaccttgccataaatattccttcccatgcttttgacttcctacaaataccgcagatggaccagtacaaagctacggagctgctcagcggaaaagaagaaaacataagtctgcttccctataaggctactaatgtggccgtcgaaggatatggaggaaagatacttaagataaagctataacggagtcacaactctggtgatttattagatttgacactgattatgcagaacaacacggatttcttaatcgcttcgtggttttccgcataatcagtgccaagtctttatttgttctcttccatatattccttcagccgatatagccgcgtgatggcaggattataaaaatcatcaggataatgtgcatctatgtcactcaggttagcttgcacaaaacgtttcacatccactatgttctcagcatcagacaatgttacactttgagggaaagatgtgctctttgcccaagctatcagcgctttaacgctatcttcatcaaatttatattcggccatattctacatattttcttgcaaagatagtgcaaaccggatgcagaataaaatgacccacccatttttttatgctaaagttatcctcatctgcatgaacaaaattccaatttgttgtgttatataaatgtgtttttcatagtattagatataagattaattaaaagagacgtacccgcttgtgataagtaagtacatcaaaaacagaagcgtctgtttgattgataaatgtgtaaggagcatcggtttaccagagccgatgcttttttttacccttctttgtagcatgttagaaatattatccgtaaatttggcagataataaggaaagaatatgatatgaatatccctgttatatttcaatttttgaaagaactgtctgcaaacaacaatcgtgaatggttcaattctcaccgggaacagtatgaagtcgcccgcagcgagtttgaaaacttgcttacagtaattatctcccgtatctctttatttgatgaaagcatccgtggtatagaagcaaaggactgtacataccgtatttatcgtgatacacgcttttccgaagataaaactccctacaagacacatctgggaggatatatcaatgcgaaaggaaagaaatccgaccattgtggctattacgtgcatctggaaccgggaaactgcttgttggccggtggaagttattgtcctcccccgcccttgttaagagctctgcgacaagcggtacacgacaatatagatgaatttcgcagtatagtggaagatcctgctttcaagcaatactttcccgtcatcggagagaattttctaaaaacagctccaaaaggatttccaaaggactatccctatctgaaataccttcagtgtaaagagtatacggttgcctgctgccagccggacagcttctttcttgctccagactttttggatcgtacagacgacatcttcaagcagatgaagcgtttttctgattttgtgaattacaccatagacgactttgaataatttacctatataactaacttaaaacatttgaattatggttatagacagacttgaaaacatagaaaaatatactttgctgcatcctctgtttgagcaggccattgattttttaaaatcacatgacttgcactctttggaaatcggcaagaccgaactgaaaggaaaggacttgctggtcaacgtggcgcagacaaacccaaaagaaaaagaaaatgccaaactggaaacccataaagactatattgacattcaaatacccttgtccggtacggagataatgggttataccgccgcccaagactgccttccggttgatgctccttacaatgcggaaaaagacatcactttttttgaaggactggcggaggactatattgcagtgaagcccggaatgtttgctatctttttccctcaggacgggcatgctccgggtattacccctgacggtgtaaaaaaaataattgtgaaagttaaagcgtaaatttatcaaatatccaaaactcatcctctttatggaaacattgaatttaatcaagaatgacccatggctggaaccttttgccgatgccatcaacggacgtcatcaacatgccatagacaaagaatcggaattgaccaacaaaggaaaactaaccttgtctgattttgcatccggatacctctatttcggcctgcatcgtactgacgatggttgggttttccgtgaatgggcgcctaacgcaacccaaatctttatggtcggaacttttaacgattggaaagaagaaaaaaaatatagcttgaagcgtaaagcaaacggtaattgggaaatcaagcttcctgctgatgccgtgaaacacggtgacttgtacaagctgatggtacattgggacggtggttgcggtgaacgcattcctgcatgggctacacgtgtcgtacaagacgaacagactaaaatattcagtgcccaggtttgggctccggagaaaccctataaaatgaaaaagcgggttttcaagccatctacagatcctttattgatatatgaatgccatatcggtatgtctcagcaggaggaaaaggtcggtagctataaggaatttcaggaaaagattcttccacgtatcgccaaagaaggctacaactgcatacagattatggctatccaggaacatccctattatggtagcttcggataccatgtttccagtttctttgccgcttcttcccgttttggtactccggaagaactgaaggagttgattgatacagcccatagtatggggattgccgttatcatggatattgtccattcacacgctgtgaagaatgaagtggaaggcttgggtaactttgccggtgatcctaatcaatatttctatcccggtggacgtcgggaacatccagcttgggattcactttgctttgattacggcaagaacgaagttattcacttcctgctgtctaactgtaaattctggctggaagaatatcatttcgacggcttccgctttgacggagtaacctccatgttatattatagtcatggtttgggagaagcattctgtaattatggagattacttcaacggacatcaagacgacaatgccatttgttatctgacacttgccaaccggcttatccatcaggtcaatgccaaagccatcaccattgccgaagaagtatcgggaatgcccggactggcggcaaaatatgaagatggcggctacggatttgattaccgtatggccatgaatattcccgattattggattaagacaatcaaggagaaaatagatgaagactggaagccatccagcatgttctgggaagtgaccaaccgccgcaaagatgaaaagaccatctcctatgcggaaagccatgaccaagctttggtgggcgataaaaccatcattttccgcttgattgatgcggatatgtactggcacatgcagaaaggagacgagaactataccgtaaatcgaggcatttctctccataaaatgatacgtttactgactgcgactactatcaatggcggttatcttaactttatgggcaatgaattcggacatccggaatggattgatttcccccgtgaaggtaacggttggtcttgtaaatatgcccgccgccaatggaatttggtggacaacaagaatctggcatatcattatatgggtgactttgatgctgccatgttggaagttgtaaaaagcataaagaacttccaggctactccggtccaagaaatatggcataatgacggtgaccaggtattggcctatatgcgcaaggacttgatttttgtattcaacttcaaccctaagcagtcttttactgattacggtttcttggttcctgccggaacttatgaagttattttgaatacagataatccagattatggcggtaatggtttgacggatgataccatcaaacattttaccatccacgacccgctttaccaaaaagacaagaaggagtggctgaagctttacataccggcacgtacagctgttgtactgagaagaactaaatagtcatttcataacacaaaaaaagaggcagatatcaattcagatatctgcctcttttttatatatgagtcttttatttcacttgactgtcgatgaagttcaacatcgtttttgcattatccatcatcttcttttgagctggtttgtccgcagagagcaatggaataagtttatccaaatattctttggcttccttgaattcaacttttgctttttctacatctgttttcatggtattggcacccttactataatacaaagaacccagactgttaagtgcatttacattatctgcttggatagctatggcttgtttaaatgcttcttcggctgcatccatctttttggctttctgcgccatgataccttgatttacgtaataagtggcatacaatttagtcaatgtcttattaccgggatttgcttccagcccttcctttaaagtggcaacatactcatcatttttcttcaaatctttcaaagcaccggctttacctatataagcatttgccaggttatactttttctgtacagcaatatcaaaatacttcaaagcttcggcaggtttctttatcttatcggcacaaacgccacagttatatgcaattacggaatcttggttgtttgtttgtgtcagataagtactaaattttgtgtaagcttcctggtaatttttagcttcaagagcagccttaccatcgttgaccaactgggcagggtcagcattctgcgcaaagaaattcgtagctgcacaacatagtgcaatagataagattaattttttcatatgctttaattcatttaaaagttgattcccaaagttagtttacaatggtatagaagcaaaacctttttactttttttgaggtttttagcatagtcgtaacaagtgttattttacgtaaaagcaaatatccggatatgtgtgttgggttttgtcacatatgttacacttatacttagaatatcatattatctttgccacaaaaaaagattatggaacaattacatgcgcatgaagtccttcacatgatggaaggtaatagttatactgagttatcattgagagaagccattatccaaaaattcggcgagcagcagcgttttttcacctgctctgccgacaatatggatgtagataccctgatagaatttcttaaaagaaaaggaaaatttatacccgccaatggtggatttacagtggacatgactaaagtttgcaatcactgatgaggaatattaattccttcttctgttaaattgaatattatttatgttaatagttaacggaaataatattctactaaaccatgttataatatccgctgattacccgctaaaatttggatatctcctgcaagtacgtatctttgtactgtgtttttcatagtattagatttaaggttaataaaaaagattggctgtctgggatagatagcctttttttatgtctaaatgtcatctttcccctttttagttatagttttattctatctttgtaggtcagataatccacgcagcattaatagaataaactgaatatgggaaaacgctttatttttatcttgatggcatgctcattattgagtatagctattgttgtgcatgcacagcatattgacaagcaaacatatacttttgccatcaaaaaggctgatactctgaaactggacaagtatgtaatgattgatcaaagacaagggacacaatcaaagcccgtcattctttttgcatttgggggaggtttcaaaggcgggagaagagataatcccgattacatttcttattttcattttttggcacgagccggctatgtggtagtatcaacagattaccgtacccaattaaaggatatagataaatcggagtattcggacttgcaaggattctcttctgccctgcaacaagcaatcacttgtgctgtagaagattttggtgatgctacaaattatataattgagcatagtgtagaatggcaaataaatcctgcacaaattatagcttgcggttcaagtgcaggtgcgataactgcccttcaagcagagtatgagatttgcaatcaaacggcttttgcggacagattacctgccaatttcaattatgcaggggtcatttccttttctggagcaatctgtgccaatggtattccaaaatggataatgtccccttgtcctcttatgttgttccatggtgatgccgacagcacggttccttttactaaggcagtagtagaagaggaaatggggctatggggctcaaactttatctgtatgcaactgaaagaaaaagagacagcatactatttctatatagcggaaggtataggacattccctatcctattctcctatgaaggataatcgtcatgacatcctgagcttcctaaaccggttggtacttggtaaagaaaaacgttgcattacgactgtagagaagaatccggaaatatctagatataagagtgattttacaatagaagattatatccgtgaaaatatgcgttaattcctatctttatatcctttccagagtttttgtttcttcaccaatcaattatctttgcacattattattctataaaaacaaatctttaattctataaattatgttggtacgtattatcagtatggtcatagccggagttattatagtatatctagtccgttggattgataattttttctccaggtatcgcaaataaatcttgcctgcaatgtaaaccaaatactccaatttgtttcccattacaacctatgctgacaaaatgcggacattttctaattctaaaacaagaaaaccgcaaaagctttttattagccatttgcggttttttccttgtgattcaagtaacgttctttaatcgcctgattattaatcatttgtataaacgtatggcctacaatatgcctacatttcttatctattacaggttatttcttacttaataagacttgtattagacgttccttctcctcaattatcctttctaaatcagctatttttgcatctttatcaagttcatttgattttattccagttatgggaatatcatcaaagaatacacctacaggaacctctaaaacctttgctattgcctcaatggtttttgtgttcgttgatccatttctaacaatagcctgtatgctactatcttcttttcctatacgtgaagcaagttctcgtatagtgattttctttaattcacataactctcttattaacaaaaaattagccatattacacctttgttataacttttattaacgtgaattttattcacctgtggtaaaaataattatacctttgctatgtaaagttaacaataatgagtatatttatcacaaaggtatgacgaaaaaaaaattaaaaaggaatgatgacggcgagaaactaagaatgtaccttttgaatttgccggtaaaagaatcttctgaaatgtcccttaaattggcagaagcatgtaaagtgccattacatacctttcgtaattggcgaggtagtcgttgtcgtattcccgaacttgcaaaggataagatcgaggaagtaacaggcgtaaaaatcttccatagtgaaaaccaataaataaaagaagaatgaaatcaaagaaattagaaatcgaaattccggaaggtaaaacagctgtctggagaaatggaatcttaacccttattgatgaaccagaaaaagacgtaagaaaacgtattaagacgtttgaggacgcctgccatgaaattggcatcgatgcagaagcatggaaccgagataaaatatccctcggtcttgaacctgacgttttggcttttctgaaactccgtatcattgtcaaagctttaaatgaaggctgggaacctcgatttacagaggatgaatgccgttattatccttggtttattctttatacaggggaagaatacaataagttggacgaggaagaaaagtctcgtgtggtgtatcggtcggtcaactacgcgtacgcgttgggcggtgtttcgtgtgcgagcgcgagtcacgattcatcgagcacgtatgcgagcatcggcgttcggcttgccttcaaaacgtcggaactggcagcatattgcggtcgacaattccttgatatttgggcagactttgtttttcttccggaaaagaaaagtgaataaataaccggggcggcttttgccgctccatataataaccgccggagtgtggagataaccccgaagggcgaaagcgggtgttattggtagttcgatgctatcctccggcacagctataaacaacaatgagcaaaatttacatagtaactaaaagggaatccggaatatacgaagaagacggcgtttggttttctatccttgccgcatttgatacgagaaataaagcagaagaatatttaaaggaatatgaaaaaacagctcctaaagaagcttactacactttctatcgaatagaacctgttccgttgtttctttcttctcataaagtgaaaataaacagaccgaaacatacgacctatcctattggtgaattggtaaaattaaaaataagtggtgaaaaataattcaaatcaagaaaagataatgagcaaagaagaagctatacaagcaatgaaagagggtaagaaggttacgcaccgtttcttttcctctgacgaatggatgactattgaaaacggatttcttcttttagaagatggtgtacgtatctctttggaagatttcttcaattttcgcagtgatagtctttgggataatggatatgaattgtataacccctcataacatgatagatatgaatacaacctttgaaaaatcggctaataccactgatgagtggtatacacccaaagaaattatagacgcattaggaaagtttgatttagatccatgtgctccggttaaaccgctttggcaaacggcagaaaccatgtacaacaaaaaccatgacggattaactaaagattgggtaggtcgtgtctggttaaatccaccttattcccgtccgcttattgaacaatttgttcgtaaactggcacaacacggcaatggcattgcgctgttgttcaaccgctgtgatagtaagatgttccaggatattatatttgagaaggcaacggcaattaaatttctacgcggaaggattcgttttttcaggccggacggaatacggggggattcgcctggttgtggtgctgttttgatcgcttttggagaagaaaacgcagagatactaaaaacttgtaacataagtggcaagtatgtaagaatcaattagagtaaaacaaattaaatatgagtgaatattcattgaaagaaagagttcagatgttaacatcatcgcttgtatatggcggtcctatgacatttgagcaaatcaagaaattagattggttgaaaaatacatctgaatacggaatattattttatctccgggaagctgaaagatatgaatggataaagactaaatgtttcaaaggtgataaaccgaatatctattcggcaacggctaaaggccgaaaaatggctgatgcaagagattaaataaaaatggataagaaaaataaaagggtgtatctttctaatacaaaagaagaaagagcgataaatataaatcagttttttacactttatgtggacttttctaaaaataatacagcaatgaaatcaacaattaccacccccgatgaattaaccacgttacgaatagaaggcagtagtggaacctataaaatattcagtagcttccgccccatggaatcccctgcattcgtggatgcaatggaccggaagtataatctggcggaaataaagaatctttccgacggaaaaggttatttcctggtacacctgaacaagaagcaacaggaaaccatacaggaggatttaaacgctatcctttgtgatagtgtgccatgccttctataaactaagacgatcttaacgaaatgccatgaaagaagacagacgcctaagaaacctacgttatcagatgcggaagaaaggttaccagttcgatacaaagaacctggtggtcattatgccttcacatgacaaacgttcccttctccaggaaaggagattaagcaaattcggtttttcaattcagtataacatgtttgaacaatgaaagataaaaatttaaaatacatcgcccacgctattatcgtggttgcctttatgggactgattgcctttgtcatttattatacgggtaaaaccgcttttctttggctgttattattcgttttcctgtatcaaccttggggagacttgaaaacaaagcaggaggaaaacaacgaaaaataagtaactatgtaactttataacgatgataaaggcagaagacatctacaaagtaaccaacaacgggctggatattattctacattattatccgcaagcccgggattgtgtcggaaccaaccgccatttcaaacgccggccgtcagaagacgacgcgtcggcctgtatcaagctattcggaaaggaaggttcccagcaggtttataaggtaacggatttcggcgataccggaacggctcaaagccctgtcgatatctgcatgtatgaggaaggcctccggtttaacgaggcgatccttaaacttgcatccatgtacaacgtaaccgatgaactcaaccgtaacgtaaacaagccggatatccgtaaggttccggcctcccaggatcagaaagacggtactaaaattttcgagcttgccgatcatctcaccccggatcagttacgcatactcggcccccgtgtcacccaggagaacgccgaggctctgcactggtattcggccaaatatatagggtatgtaaaaaatcgcgaggtaacctataaatacgcgactgcgacataccctatctttatgcgcgaatgtctggtaaaaccggccgaaggcgacacgcccgaagtgaagttctataaaatatacgagcctctgaatccggacaagcagtggcgtttttcctacaccccggaaggtgtcaagccgaaggactatataaacggtctttccgaactgaaagccttataccgggagtttaattccagggaagaagccgcctttaaaaagaatccggccaatgcggaaaagccttataaggaacagaagctgcaggaggcgtttatatgttccggagagcgcgacgccctgtgcgttaaatcgctgggcttttccccgatctggtttaattcggaaacatataaactttccgaacaggactacaaggagatcatgaaatacgttgaagtcctgtataacatacccgatatcgacacgacgggcagggtaaagggtacggaacttgcactatgttttatcgatatccacacgatctggctaccggcctggcttaccacttaccgggatcagcggggcaaaccccgtaaggacttccgggactttatggaattacgaagcaagaacgaggatttccgtaaccttatgacgcttgccatgcccgccaaattctggtattccaagtttaacgagaaatcccggcaatgggatcacaatatagacgcggactgccttcactactttttacgtcttaacggtttctattcgcttcatgatgaaaattccagttcaacgaaatacatccgtattaccggcaatattgtaaaactgataaaggcaaaggatatccggaagtttatccgtgagtgggcccaagagaactttttatcccgcgatataaggaatcttattctgaacagccccaaactgtcagatacggccctggacaatttgcaggaaatagaactggactttaccaattatacccataatacgcagatgttcttctttcccggttgcagcatggaggtaagcggtaccggtataaaggaacatccggccaacggcagcacattgtcccactacgtttgggaagaaaacgtactgaaacacaaagtccgtcttatggaagacatgtttaccatttcccgtaaaaaagacatagaggacaacgatgtgtttgatatccggataaatgccgtaccgtctaactttttcggctatgtaatcaattcgagccgcgtttactggcgtaaggaactggaatacaatttcgacgacaagagcgtgggggaagcggaatcctaccgggaaaaacataaattcgatatcgagggggaaggcctcacggcggaagaagttgccgaacagaaaagaaaccttatcaataagatatttactatcggttatatgctgcatcggtacaaatccccttcgcgtgcctgggcaccacaggccatggataacaagatcggtgaagacggtgaatgtaacggacgttcgggcaaatcattcatgttcaaggccctttcctactttatgaagagcgtcaagctttccggccgtaatcccaagttaatggataatccgcatgtgttcgaccaggtgaaccagcataccgactttattctggtggatgattgcgaccggtatcttaatacgggcctgttttacgacatcatcacgtcagatatgaccgtgaacccgaagaacaaccagtcgtttactatacctttcgaggaatcggccaagctgggatttacaactaattacgttcctattgattttgatccgtctacggaagcccgtttgctgtacctggtattctccgactactaccaccagcgtacggaagataacgactaccgggaaacgcgttctatccgggacgatttcggtaaggatttgttttccaagacttacagcgagaacgagtggaacgccgatataaatttcttcttgcagtgctgccgtttttacctttccctttgcgaggaatctataaaattgcttccgcccatggaaaacattatcaggcgtaaatacaaggccgatatgggcaataactttgaggactgggcgaactcttatttctctccggacagcgagcacctggactgttttatcgtccgtgaaaaggccttcgccgattacaaaagcttttccggtgtgaataaaatcacgatgcagcgttttacaaaggccctcaaaggttttgtggccctttgcccctacattgacgaactcaacccgaaggacctttgcaactcccaggggcgtatcgtacgcaaggataacgacggcaaggccgccgacatgatctatctgcgttcatgcggcacggcggaaacggctgccggtggtggaacggaaccggccgatccgacactcatgtttgtacctgatgaacgaccggatgaatgaataacgcgcatttgaaattaaacagcatgtccgagtttaccgcgctctggaacagcggcgagaggttccggaaattcgccgaacaggtctaccgctatctggagcgtatgaaacccggtaccgtcctggcactggaacgctattcgggcgagcagctcgaatggatcatcaaaacggcctgtgtttttatcctggaaggcgacaactacctggagtatgaatttaacgaggactatacggccgtcgtgcaccgctatatacccccggacgtaaagaaatggattttaagcaggtgcaaacatcgcgtataagacggatcggagccggtataaaatacgaaaagagggaccagatacgaatgtgtcggtccctcttttcgtatggaaacaaatgcgtcccgcccggcttccctccccataccccacctctatttcatacaaaattttagtaaccttgtaacctttgtttgcttgaaagaaaaaagtctgaaaatcaaataaataaataggaaataaaggttacgaagttgcagttacaaaacggttacgaatttttccggtttgtaacaccggcctttttatcttctaccggtaagcccggttacaaactgttttccggccatttttttgtaacggaaattagtaacgttactaagttgctaagatacaggattttacctttgtcggttgcccggttacgaaattacaaaaatttagtaccggattatattagcacagcctggcagagaaaatgtcgggtgtgtggcggctggaaaaggcatattataattattctcccggagtatatttatcaaaatgacgactgaaagcctacattttcccgtaaatggcagaccaacagccgataaaggaatatctttgcctttaaaaaggaatgttattgctatgattaccacccgaatacagatcgaatcctacctggccgagtatgtccggggcaaatattacgacgaaacggtcggtaccgtccgttttccttcctcgtccgatatctatgtgaccgtttacgatctcatggagaaacggccggtaaattgtccggctgaccgcggcaacctggagtttatgctgcctgaccgccgggaggccaattttgccggcggcaagtctccggaacagttcaattacatttccgtacgcggtaccgccattcttgaaaagcgtctgcgtgccctgatgtgggccgagctgcacgaactcatggacgaaaacaagcacctgcacggaatcgagtttaaggaaaccgtttttaccttcctgaaaaagtatgatatctcttccattcaggaagacgggctgctgaaaaactaccagcggtggcgggacagtttcaggcgtaagaagaaaagggcgtataaccgaaaaaaagtgtaaaaaagcaagttattttttacctaccaactgtatctgtttgtccttttttgtccggtttttggctgaaaaacgtccgaaaaatgctgaatgtttgattatcaatactttatatctgtaattatgtcaagaaagttaatatccgccgcccatagcctgcaactggttcccgtttacaacattatccattttggcgtcgtgctctcgaaagtcgttatccgctctatcggaaaacctgatattcttatgatcgtaccgggaaccttaaaaccgggtgacagcaaaaatgaagacgtctatactaaaaaacataccttcaagcttgccgacgtgtcgcaaaataagacgctttacctggaaaatctgaaagcgacgccctttgtcgccctctatactgacgaaacgggtaacacccgtgtttccggttctcccgattacccgcttaccttttcttttgagatcggcgggggcctgtataactgcaccctgtccggtacgggtccgggcgttgatgcgttcctgtaggttcctttcagtccttctctacctattatataggcgttttctttgccgtaaaaaagagaacgtggacaaaatacaggagatttttacagcaccttgggcaatcgctgataatgattattaccggttgctttccttacttgtgccgtgtgttgcagccggcaacctggatgcgatcgaaaaacggctcgacaataataaaataaccgcctacgctactacgccttaccttgccaaccggtgggaactggatgatgacaccctgccggctgacagtgtggccgtcattatcctggaaggcaccttgtattcctgggagacttaccgcctggaaaagcagctccgtgatatttccgataatcctaagatttgcggcgcggtcctgtggatcaacggtccaggcggtatggtcgcacatgtggacctggcggctaaaatgattgccgaatcttccaaacctatagccacctacgtggccggtaccatgggtagtgcccatttctggctgggcaccgccgccggtagaacctttatcgcttcccctatgtgtgaagtcggttccgtcggtatcatgcttacttaccaatcctttaaggaatatttcaggaaacagggcattgattaccgggaaatctatccggatagtgccgatctgaaaaactatgaaacccgcgcgattgaaaaggagaacaacgaagagcctataaagcagcgtctggccgtcatgcaccgtattttctgcgatgcgatcagtcggaatctgggtattgcctatgatccggaacttccccttttccggggacagatattcaccggtgacgtagccgtggcaaacggctatatcgaccagttcggtacgctggaagacgcggtaaagtgggtactggcacaggtcaccgtcagaaaagtaaacgagatgtataacatatagtattaactttaaaattttgtatatatgaaattggattttaagagcttatccgctcacatgctgggcttgttgggcctgtcggaatggagcaaggtagaggataagaactctatcacggccgaggaaatggcaaaactgaaaaactacggttttcctgaaaaattcctcacggactttaaagcgtccctcgaaaacgatttccaggacgaagccgaagacggaaaccagggagagggaaccgaagaacctaccactaccgctttccttcgcggtttgttgggtgatactgccgcccgtctggtacaggcgcaggaacagcttgaagccttgcagacgcaacagcgtgacgaaaaccggaacaacaccgcgctgattgccaagaaggatgccgagataacgaagctttccggtattatcgcccaactttcagccgccgcggaagatgatccgggcaaagggaagcagcacaacgcccaggcggacggtaaaggggctttcaatctccgggacgaaaagcagctgggaggcttgcagggtgaaatgttctcactggaccgcccgtataaccttcgcgccaaagctgcgttaatggaggctgccggttttgaaatgatcgctcttccgaaagccagttcccttgactacagccgtttgaaggaagacctcggggctttttatcgtattccctggcaacagcgtttgcagtcgtttttaatggaacttccttccattgaaagtattttcccgcttgaatccggttatcaggatttggctacgctggttaatatctggctgggcgagttctcacaggccggcaatgaggaatccgacttcgacaaggtgactaaaggttcctacgagttcgacgatgaaaccctgcgcatgttcaacgtgatgtttgcacaccgtttcaaaaatttaaaggccctggagaaaacctggatcggcactttgaacaaggaaggttcaaaccctatcaagtggtcttttatcgagtacatcctggccgaaaccgccaagaagttgcataacgagcgtgaacaacgccgtattaacggaatccgtaaggacccgaatctgaacgaaccgggcaaagcacttgctgcagctgacggcctgtatgagttcctgaacaagaaagtgaacggacataccgatatcaataacggaaagttcgtttaccagattaaaccgttcgagctgggagaacttaccgaagcaaacatcggtgaaaaggtgtacaagggtacttccatgatcccggcggttcttcgtgacagcggtaacctggcactttatatgccttcgcactttattgtattgtatcataaatacaatgaactgcattacggacagaaccaggattacaaggctaatatcatgtatgtgaaggaatatccggcggtaaagattatcccggttcccaatgctgacaaccaccaccgtattttctggacgtttgaaggcaacattaaaacctacgaggacaaaccaggcgaaatgacggctttcaacctggagcaggaagactggagcctgaaagtatggagtaactggcgtgaaagtatctgggctattgccgtgggcttcaagtacaccaagaaagaagatatggactatacgcgccagatgatcttctgtaatgagtatgaccgcccggcgtcttactttgtggacgctgacaaggacaagaacccgtcggccaagcttcatacctccattgttaccgtagcgaacacagccgaatttacgattaccgatattgaagacgcgccggtaggtacggttatttccctgaaatgcggaagcgtggataaaggcgttaagattgagaaaagcggaaaatttgaccttatttccgctacctggcagccgggtaagggggatgttatcaaactgatgaaacgtgccgacggtaaatttatcgagatcggccgcgaaaacgcttcttccgatgcgttgcagtttgcgccggatgaaacggatccttctttgcttgacggtgaagtattcgtaaccggtgagaatacaaaggcaacggcaatcactaactttaccgatgcggaagccggtgtcgtttacacgatctacggaagcggttctgaatttgcttccaccattgcagccggcggaaactttgtcttaaccgaagctatgacgctttccgaaggcaagtttatcaagctggcgaaagccgccgacggtaaattctacgaagtggcaagaggctaatttttggcggaagggatactttatcccttccattttataaccttataaatcattaagttatgacatacgtaaaagcaagcgtaagaaggccggccggcaatcccggtaacggtattcagcccaaggatcagctcgtaatttacgacgttgacgatattctttccttcccgcagagaaacgatgccggcgtggttatcgaggatgatatcgtaatgaaggcgggacgttacgcgatcggtatttacctgacacccggtaccgctgaaatcagttccaacagtgacggggaaacggacgccgaaggttatacgccttccgttaagttcaatcatcccggtaacgaacaggaaattcgcgagtttaagacaaactggctgtccaagaaatgtatcgttgtgctccgttattgtagcggaaagcctgccgatctgatcggaacgccctgtaacccgtgtaagttatccgtttcttataccggttccaatgaatcgaatacgaacgaacttactttcacccagatcagcaaaggggatgatatcgccatttaccggggtaccgacactctggaagaaccggtggccgtggtggaagccggagccacggatatagattaccagacggacgggcagtaccagctttccgcgggtgcggctaagatagccggtgttaccggtggaagtcacggctcggtaattacccttatgggatgttcgggtgttgcgcctacggtggaagcgggcggtaatttccttctgaaaggtggtaagacgtttaccgcttccgaaggttcccaactgacgttgcgggcgtttaacgacggttcggaggctatgaaatggattgaacaaagccgttatgaggcgtaagtaaacggctttcatgtaattcaaagggtgaccggcagcacatgcccggccaccctttgtcctttttagagtaattgccccttttttcctttgtatcatcaaattttatatagtatgaaacaggaaattattacctatctggccggtccgcgtaactttattcagggcgtggaactgtacgagaaatacggtatcaaccgtatgttaaagaagtcattccgccggcagggagaaacggaaacgatgaaggccattcttttagaggaactacggaagttggccgggctttctgaacgtgaatttaagacgatccggcgaaactccaaacagctgaccgcggtaaaaatggaacccgcccgggaggaaacatccaaaacgccggtaaaatacagcgatgatttgctgctggaacttgccgaatctttcggcgtcagtgtggaagaactcgtttcgtccgatttccgggataaggttctttccatggatgaaaatgccgaccgtgtggaagagctggaagaggaactggaagaggcggagaaacgatacaaagcagccccggaaaccgtaaccaaaatgatacgtttccgcgagaaatttaccttcctgaattctccggattgtcccgacattctgaaaatacttgtttccgacatgttcaccgcatacgggaagtataaggaagctttcgcccgcctggaagctacgccggatgatgtcagttcactttctacagcacaggaagcgcaggcggttgtggaaaacttcatcgctaaccgcgagatgtgggatgaactggaatattaccgggagaacggaaagattctgggtaaatgtgagaaggtaaaaagtttgtccgtccgtaagggcgtcgagaacctttcggatatcgacatacaaaaggcactgaataacgcccgcgccaacctttcaaagaataaggcgaaactggaacaggccggggatgatgagaagaagaaagcgagtgcccttgcattgatccaaaagtgggaaactacacagaaggccatagaggaagaaattgaggcgcgaaaaaaaaagtaattgaacttattgccagtctgacagggaaacggcaacggatcacaaagaacctgggccgtttctctcacccttgcgaccgctcggagctggggcaccagctcaagacattaaccctccggatagaaaaagaagaaagccggcttaaacaactttccaatgattacaaaccaaatatataacgaggattgcctggaggcgttgaaacgtgttccggacaattccgtagattgtataataaccgatccgccttatttcctgggaatgacacacaacgggcagaaaggcagttttaaagatttgtctatctgtaaacccttttaccgggatttgttcctggagtttaaccgggtgaagaaacccggtgcttgtgtgtacttttttacggactggcgcgggtatgctttttattatccgttgtttgacttgtatttaggtgcgtcaaacatgatcgtctggaacaaacagtcgggcccgggtaatcattacgcctttatacatgagcttattttgtttcattgcggaaagggtgtttctatcggtgccacaaacataatagataatatccggtcttttgcttccggtgcgaaactggtagaaggtgaaaaggttcatcccacacagaaaccggtggcgttgatccgtaaactgattgaagacagtacaaagcccggcgatctgatcctggacactttcggcggttccggtactacggccgtggcagccattgaaagcggccggaactttgtattaatggaacaggacgaaatttattatttcacggcacagaaacgaataaaagatgcgtatgaacgatttaacggtggtggatagtatttacctggatgcgcagcaaaaggaggatgtacggcgtttgtcttctttagggtattcgccgaaagacatagccgtttccctggggatttctttggaggatgccgggctttttgtccgggatgcggaaacggtaggaacttccgttaacttcctgatccgggaagggattctggtagcacgtgccgcgcctgaaataaaactccatgaagcggcggaaggcggaaacgtggaagctataaaacagctggaggccgtacggaaaagacatactttcgaacgtttaatcgaacaaatggatgacgacgaatttaattaagccctcacgaatagactttgacaaggtggatatcaaccagattcaaaggattctttctaccggtacgctggaagccctcgcgcccgatgaaagggaatattacagccttatggaaatggtacggggccttcgtgcccgtatgcgtataaatggtaagctggtgacaaaggccggcatcatccgccttttgaagtcggaaccttacggcctttcggactggatggcccgccaggtgtacgctgacagtctcaatttcttttatacgcaggataacgtacgcccgcaggctttcgctaacttgtatgcggaaaaggccgaaaactgggcgaataccgtctttcttatgggaaatgtgaaggaggctaagaacctgctgaaactggcggcggaacttcgcggatgttataaggatcaacaggccgaaataccggaggaactgctttcacagaaaagcacggttatttatactaccagccgtaaggatctgggtgttcctgaaatcgaccgtaaggaactggaagagtttatcgacgcgatcccggaaattcctgttattgtacgtgataatataaaagaggacgcgcgtattaaagcttttgacctgaaaaaacgtatgttgtatgatatcaaagagttcggggaagataacgaaggtgagtaacgccgatgatgtggaaatcaaatacggccatataatccaggttctgacggactggatcgatactactatccttgtatctgttgacgggcgcggtacggccaaatcgaccgttatacaagccaggcgttccgcccgttgtgtggaagaaatgcccggcggtgcgttcgcttttgttgccaatacctacagtaacctggaagataatataatgccggccgtacagaagggctggcagcttatgggcctgatcgaaggggtacactatgtaaaagatacccgcccgcctgaatcctggcggcgtaaatgttcggttatcgtggatgattacaagtatgtttacagcttctggaacggatgtgttattttcatgggatcactggataacccttcgctgcttgccggaaagtctgtaatacatctgttttatgatgaagcgaagtacgacaaggaaatgaaagtaaaccgcgctatgcctattcttcgcggtgatgcgatcacttacggacattcccatttattcctggggataaccattactaccgatatgccggatatcgacgaaaacgagtacgactggtttttccggtatgtcaagcaaatggacccggaacggatcattaaaatagtacaggcggcaagtatgcgtaatgacctggtaatttctctattaaaagaagaaagaaaaaataagccttcccctttgaaactgaaacgtttgaaacgggatattgaatattacgaccgggctttgttgaagttgagaaaaggacaaacgttctttcttaacgcttcttcattcgctaatgttgagatacttacgattgattatttaaagcggttgtataatggtacgctggagcttcacgaatttaaaaagtcggtggtgggtatgcgtcccggtcttcgcagggatttacgtttctatgtgttgtttggtgaaggacataagtattataacggtaccatgtccggagaagccgcttacagctcgcgggagctccggtacctgcaccatgataaagcgattgaaggtggtatggacttcggtaatatgctttctttggtgatcggtcagccggacggtgcttattaccgggtacataagaacttttttgagataccgccgggctggttccgggagatcgccgaccagttcctcactttcttccagaaccacgaatataaagaactggatttgtactatgaccgtgcaggtaataactttgagaaacagaaggaggattacgcgggtaagatcaaagacgccatagaaaaagacggtagcggaaaccgtaccggctggatcgtaaacctaaagagccgcaaacaggcagttatccggcaggatacggaatacgactttatgcaggagattatgggcggtaccaacaagaacctgcctatcttgctggttgatgcgatgaactgtaaagaaatggttagttccgtagaaaaggcaaaggctgaaatcaaataccggggtaattctaaggtagtgttcaaggtgaagaagtccgaaaagctggcaccgaaaaaactaccgatgttatccaccaatttctccgacgctttcaaatacttactgatgcgccccggctggatagctttagtacgaggcaagcggacgctgcaggccgactcgtttgtggatcaatggatagagaacaggcataaaaggtaattgccttgtaacgctggaaaatcggttttccggcgttttttgtgttaccaggttacgggtacccctccgggagaggtcatatttcaccttttagggggagggcaactgctttccgacttctgagcggctcggtcttcggaaggtgctatttttttagtttttgaaattttctccggtttttgattgtttttcagtcgtttatctgcatttagaccaaaattttacgcgaaaaagcgtgttttttatgcgtttttgcttcattttttggggcgtttttcatgaattaccgtgtatttttgggcggttgcctttcatttttggggataatattctttataattgtacatattaagtatttttgcagccgtcaaaattacactgcatataaccgtcagaacttacgggtggtacagacgaaagtatacactaattttaagttactgatatgaagaaattattattaattaccgtgttggctattttagtagtagcagctacagcacaagaaactcgaaaaacgttttgtgaaattgttggtacagggaaagtcttaagttctaaagtcaaaatacaaatagacttcgggcaaaaaacatcttatttcggaaaatacaaaacgtttatggtagatgaatccgggaagaaaattgaatttaattctatggtagacgccatgaattatttagcaaaatttcggtggaaatttgagcaggcgtatgttgttacaaatgagagcacgaatcaaaatgtatatcattggttattaagtaaagatatagtttctgatgatgaaatacgagaaggaattataacacaaaaagattttgaagacatggagaaagcggccatggaagataaagagaataaaaatgaagaggttgaaaagaaagttcctttatttatgcgaaatatgaaaaaggaaagtgatgaagagggtgaaactcaaaagagatatgaaccataagaatagattaacgctcgccaattctggcgggcgtttttgttacgaagtaacgaattatagagtcgacaaattttctttttcttataaacttttattaacgtttttttttttttgttcagattttaataccgacatttgcccctgtcaaaattgctaccgctggtgcggtccggtgagtctcggttattggctcgaataaacaacgggctttttttatgctcggtatttatctattttagatatataaggcggttgcctttccctattacttttaacccgttcatcggacggtttgcggtagtgattttgacgaattaggggaaatggtagccgcctttctcttttttaatagtcaaaatcactatcattatgaaaaaagaatttcaatccggcacaagctacgtgccttcgttccgtactggtagcacggacgtaaacacgatccaacatcgttattttcaggaattggaaaaagattgttccgtaaactcggcttccgatgcttattatttatctgctattgcctggttctgtctaacctttatctttccgccggctgttatcggtgcagttgtttgtgtgtaccgggcaaagaaggtacagaaaggaggccgaaaatgacatcctattttatagagcttaacgagtataagccacagaatcgaaaatgtgctgaaatggcagagtttgcaaaccagtttggtaatacgctttgccctgacgaaatttccttcgatgcttttaaaactgaactggaagcaaaggtaaaggagctgaacgagaaataccctaaaacaatgccgttgaaaatatcttccggcatcggatttattcacatagatcaggacactaaaacacataataacggctgtgacaagcctgtagcctatttttttatttaccgggttaaaagaatatataggttttcagagcgtccccagatagaaaagaaaggaggtgccgaatgatatatactgaatatcagcaagtgttacttacccaattacaaaacaatgataaaagaattgaggaaataaagaaggaacaggaagaaatacaggggatgtttctacaagaaagtaaatttaaaccgggtgatctggtacaggttgattataaaataagtaatgctacttttaaagttcgtggctggattttccggattacattctggaggaatcgcccgtattatcacctgaatttacccaaaaaagacggttcccgcggattaagggttaaaagtatatgcgacggggtactggaaagtataacaagtatttcacatattaaattagaagacttaaaaggaggtgccaaatgaatacaaataattctgatatcctatttttcgttagacgtgaatacggtgcgccttccattgaactaagagcatacaaggtggagaaggttaacaatgagtttgctttcctcgaacttgaacgtttacggttggttgttttttccggtgattttcagtctgtatcacttcatcacgagtacggtaaaaacaactgtatgtataatagtgctaataatataccggatttgatgaaagacatgaagaggtggcagttatcgcccattgatagacgtaattacgaacggtttaggaaagtcgccctcgggatataccggcaggccggaataattgatttcactaccttagagactacaccgattaaaaacatttaaagaaagaattattatgaaagatatagaagtaaacggcgcacatataacagatgaaagtgccgagattttgacacagtggcaaactaagacggaaccggtttccgcttgttacatcgaagttattgaggacctaatcgatttcctaatagagaaaggagatgaaagtacaccaacaaatgaggtgttaaggaggattcaattattacgtatgatgaaaaaagacatcgaaaagttgtctaatccttaatattaacaatttagcataccggctgaaaaggcagccgttgggtttaagtcccaggttagggtttgtttgtgccggggtggttcccggcactcttttttatgtccttttcgtcggtttccgttcttcccacctttgcagtataaccaatgattcaaattatgaaaataggaactgacaaatggaagcatttcggaattaattacgctatatgtgccctgttgggtaattatggtgttcccttcgccctgggtgcttcattgggtaaggaatacggggataaaatgtcacccggtaataaatgggactggaaggatattctggcggacctggccgggattgtggcgggttatttgacgcatgtatgtatcgtccggaccataatgtagaattttcaactctatcaatatgacggaaacgataattacagcgattattacggctctttgcacgggtggcctgacctggttattcactctccgatatacccgtaaacaagcggaagctgatgccatgaagtcagtacaagaggtttaccaggaactaatagaagatatgaagaatgaccgtaaggagctaaagaacgcataccaggaacagaaaaaacggtttgacgaagtggataacaagtacaaggaaatcctgcagaaatgtaacgaaatggaaaaggctatcaagcagaacgcccgtgtaatggacactatgaagccgtttctttgcggcgtgaagaattgcccgaaccgtaaatctatcacttttgatactaataataattaacgacttaataaacatgagacatggaatcgtacacctacttatttttatttgttttgcagcttgtttttacggttgtcgttctcctcgctctgttacacgaaaaacggttacagaagcaactggagaagaaaaacaaacaactactgacggagttattgaacttgcgcggagagattcgagccatgaggagcacgtacttgacgtttaccgggaagatagtacgcatatccgtatcaactacgacagcctcggaagaattaaagaaattgatttcagcaaccgaaaaactgaaaaaagaactggaaagaatcaaagcagttccttccaggatcataaggaaactaccagtcaagcggaaacagtcgttacccgtaaatccgacgttaagcaacaaagccaggaaaaagaaaaggttacaaacgggtgtagcttatggacgttcctaaaattcatgtttttctttctatccttttgcctggtccatgataactggggcaggattaaaagttttatccgccggctatggaaaaaataaacctttatgtagcggtagaacagatgaagcggattaccatttccgggggaaccttttctatcaagttccggaaatggaaccggcagacacgggacggcggcgacatggtgatactcacggctgcccgtttgaggaaaaaggcgacggatgaaagcatcgaaaattcaagctataaactattcctgacggacaccacaacaggccggccgctgaattgctgggaatgtctggtaatggagttcaacgggaaaagaataacgatttaagattatggaaataagacgaagtggcaactttggaattatagataccggcaccgacaagggtttgatctccttttctatcggtggccgcggtaaaggttgggaaccttccagcatccagttaaaccggcggggggctttcttttcgcggaagatcagcgtaaacggtacctttatcgttcccatgggtgacaataacgacatgccgggcgaggtcatgcgtttactggataaattctacgccggtgaaggcattatgggtaaaatagccggtttgcagtggggagaaggcccgcggctgtatgaggatgcaatcgacgaagacaataaccgtttttaccggcgttggaaactcgatccggaaataaccgccgacctggagtcgtgggattacacaacggttcttcaccgctcactcgtagacttaacacacatgcagggcttttttataaagtttgtccggaaccgtgcgccgcgtgtgggcaatcccgggcgtttggtacggctggaacatattccctatcagaaggcccgcctggtatatcctcccgacggcgaggatgaaccgcaggaagtacttgtgggcgactttccttatcctgatccggcttatacttaccgttacccggtctttgatccggcccacccgttcaaatatccggtttccgtgaaatactataatatctattccttttgcaaggacttcatgagtacgccgcgttttctgggtgcgcttgactggctggagcttgccggcggtctggccgctatcctgatcgcctataatgaaaacgcttcggccatttccctgcatatcgaatcgccgcagtcttactgggaccgcgcggaagcacgtataaaacaggtttgcgagcgtacgggcgagaaatacacggcccagatgctggaagatttcaaggacgaagctatggagaaattcgcctccaatattaccggaaggcagaacgccgggaaatacatgcacacgaccaaattctggaatccggaagcgaataactttgagggctggacggtggaaccgctggataagaagataaaggattatgtggacgcccagattaagatatccaataaggcggacgctgccgccacttccggcttcggtcttgatccggtactttcaaacctgattatagaaaacaagctttcttccggatcggaaaaattatacagcctgaaagtgtataacgcttccgaaacggctattccggacatgatcctttgtaaaccgttacagcagtatattaatgccaactttccgggtaccgcaacgaaagtagggctttatcgtaccatagtggaagcggaacagaacgtttcaccctctaaccgtatgaaagaaaatgcgtagtctgtttttcacaccgaaaccggaagatgtgccggaagaaccggtaagcgaccggcaaccggaagagaaccgggccaatgatagcccggacaagcatataaaggcacgccggacgaaaaacgtccattttgaccggcgagtaaaatcggagctgcacctggaagagtgtttgccctggcgtcttatcactgtatcagtcatggggacgttgacagccttacttatcttcgtgtgatcgtgaagcaacaaccgttggaatatgttctgatttctacctggtgcatggcaattaccgatgtcaaggaggtggagaaatggctggagagaaaagacatagggcgcgcggatttttatgtaggtgaaatctttcaaggttcctacgcggatgtttatttatacctaaagaaggtggcggaacgtttcggatcacgtgtctgtattttccgtaaccatgctaaagtaatggccggttttggtaacgcttttgattttgtaatagaaagctcggccaatataaacaccaatccgcgcacggagcaaacctgtataacgatagataccgggctggcccgcttttataaggagttctacgatgaaataaacaatttcacaaaggattttgataattggaaaccatatacattaaaaagagaccgagcaaatgacgaagttatttaataaaggcggtgacggggccggtgaaatagtccgtgtcctgggattgatcgataatgatcttgattttaccaagtgggaacctatcttaccgctgggtattcgggatttacaggctatcatcggaacggagcccatagacgcggtagataagtattaccgtgaagatcatgcggacgttacggaaccggacggcatggcggaaactttgcggctgatgcagcaggcggtagcgatgtttacctggttaaaggtcattcccactttggacgcacaacacggaacggccggacgtggtaaacatttgggagagaatgaaacgggcatgaccgccttacaggagttcaaggatgaagagaatatccggaacctggcttatgaagccgtagacgcgttggtggagctaatggaccgcgaaaaatttgatttctggatgaacggcattaagaaaaaggctataaaccggcttcttattcagaataaggaaacgttcgatgaatattacaatatcggaagtcaccggcttttcctggtgcttattcctatgatccgggaagttcaggacgggcagataatacctgttatcacccggaaccgttataataaactgattgaaggcgataccgttttaacggagaaattgctggaatatgtacgccgcccgcttgcacttcttaccataaaaaaggccgttgaacgtttaccggtggaagttctgcccagtggaatcgtacaggtgcagcagagcacaaccgtacgggataaactgcgggcggaaaaagaggcccggcagtcggttgctaacagcctggagcaggacgcggcggcttacctggatgtattgcaggatatcatccgtgagctggacgcacagtcggaaacggtggattactatataccgggtgttaccgtacaatccaaaggaataaccttttaatgtccggacatggagaagtttacatataatccttaattccgcaacactattacaaatataactttttaagtacctgagcaacaaaaagttgctcaggaatttgccatgtcagatttttcacctatcttagtgttgcaaatcaaaatatgtatcaaacccgacagacatggcaaaggtagcaattaaatccgagaaactcactccttttggaggaatattttcaataatggagcaatttgactccagactctcatctgtaatcgactcaaccctcggtatgagatgcaggctgtatggttatcaatacagcgaaatcatccgttcgcttatgagcgtttatttttgtggcggctcatgcatcgaggatgtcaccactcatctgatgtaccacctttcgcttcatccgacacttcgcacatgcagtgccgacacgattcttagagccataaaggaactgacccaggataacatttcctacacatccgacactggcaagacctacgacttcaacacggcagacaagctgaatacactgctcctcaattgcctattgtccacagggcagctgaaagagggcgaggggtatgacgttgacttcgaccaccagttcatagaggctgagaagtttgatgcgaagcctacatacaagaagttccttggttatcgccctggcgtggcggttattggcaacttgattgtcggcattgagaacagcgacggcaacacaaatgtccgtttccaccagaaggacacgctgaagaggttctttgaaaggtttgaacaaaacaagcttattatcaaccgtttcagagctgattgcggctcgtgttctgaagagatagtggaagagattgctaaacactgcaagaccttctatatccgtgctaaccgatgcagttcgctctacaatgacatctttgccctcagaggttggaagaaagtggaattgggcggcattgagtttgagctggcctccattctcatcgagaaatggaaagggaaggcataccgtcttgtgattcaaagacagaagcggatagacggcgaactcgacctgtgggaaggagaatacacctaccgctgcatccttacaaatgactacgagtcttccgagaaagagattgtcgaattctataacctccgtggagggaaggaacgcatcttcgatgatatgaataacggattcggctggaacaggcttccaaaatcctttatgggagaaaacacggtgtttcttctgcttatggcactcatacgcaacttctataaattcatcatggcgaggcttgacgtgaagaggttcggactcaaagcaacaagccgcatcaagacgtttgtctttaagttcatctctgtgccagccaaatgggtcaggacatcaaggaagtatgtgctgaatatctattcatgcaacaatgcttatgccaatgtgttccagaatgactttggataacaccgacaacttatagtcgtgattttgcgtattgcctcaagtcgcatggtggggtaaggggcatttatatgtctttatggtgacattcgatgcactgtgccccctttttactaacgatgcagattcttttcgcttctgtatcatattaggcgcgtagttgcggatttgaggtaataataagacggtggaggtcccttcctgcctggatgaagtcagtagtgagcagtaccggcagtttcttatattgtcggtactgatgaaccgcggtacgatcagccccggacagttccgcgtaaaatggctttctttccttctgggcatgaaagcggattacaccatgtaccggcgtgagatcatccgagagctggacggtcaactggaaaagctggacggctttttctcttatacaaccggtaaggagggcgagcggatcgttacgcctattctgaaaaccggtcgtaacctgatgcaggatttcgggggctggcatggtgtcggtgacatgctgaacggtcttactttcggtaacttttgtgattgcctggatttgttgcagcaaagcaaacaggcggcagcagaaaaagacgatccggctataaatgaaatcttccaggatatcacgttaaagctttaccggtacaaggacccggagaagacgccggccgttccttccttgcttgccattcatgcggtaaacttcttttccgccgtttgggaaatggttctttccggaccggtttatatcggtggtgaagctatcgactttcggatattgttccagaagctggcatccgaggaccggaaggcggacgataaaaccggctggaccgggatagtctttgaggtggcggcttccggcgtgttcggaaataagaaggaggtggacgatacacccttttgggatgtattgctttatctgtataaatgtaagtttgagtatttacaccaaaaacgtaacaagaaatgagaacgacaacaggaacaaaaaacaagatcaagaaattcgaggggttacgcctgaaagcgtatgtatgtgccgcgggagtatgtacgatcggttacggtcacacgatcggcgtaaaaccgggtgatgttatcaccgaggcccaggccgatgctttctttgaatcggatatcagggcggtagaaaaccaggtaaacgcgcttccccttcatttgggacagtaccagtttgacgcggtagtaagcttttgctttaatgtaggtatcggaaaattcaagaaatcaacgctttataagaagatcagagcggatgcgtatgattcatccataccggcagagtttaaaaagtggatatacgggggcggtaagattcttccggggcttgttacccgccgtgaatgggaggcgaaacgttatcagggattgacgatatgatagatataaaggtttaccgtgaatactgggaaggcgtgcaaaaacgtattcctgaaataaagaaggtgctacccgttaccattgacgaggaaatgagtaagacgatacaggggctatcaaaagaagaatgtccggtgctctttattctgatcccgtcgggagcgggtgccagcctttcggctgacaatgtgagggaaaataatttatgcgttattttccttatgagcaagtacgatccccaacgtaaaggggcttatgagactatcgaagaggtgcagccggttatggagcgtatcaaacaaatgctgatagaagattccgccaccggttgccctgtcactaaggaactggatttaaccagcctttccactcttccggaatccggcttttacaggacgtttgcagggtggagcctggctttctcatttaaaacaagattctaatggatgcttttgcgtggttctggttaactgtcataataggtattattacaataggtgtaaatgatgtgctatgtacctattggaaatataaatatacctcaaacaagaaaaatgaaactgttaaggatgaatccggggaaaggcacattatttccggattctcaaaaaatgaataactgaatggccgagaattttaaaacggatttctttaccgaccggatcgggcgtggaatacaggacatatttcaagcccaattggatatcgctaccaaacggatttaccagaaaggccgtgaacgtaagaaagtacagggaaccggggagatcatccaagggcgatccggtgcattaatggccgcactacagaacccgaattattcggtcgttccggacggcgagggggtaattgcacattctaaccttccattatatacccgcttcctggatatgaagaaacacggtaattaccagatttataaccgacagatatacgggattctgtatcatgacacactcgggaagattaaatatgaatatcaggattatgtaagggaaaggataaaagaaatgtttgccagttcgctaaaataggtaataaaattaatacctaaatatttgtaggtaatgattttattacctatctttgtttcagtaaccaataaaacaaagtttatgcctgaaatttgtagattcttcggtattattatattcctctattggaaagatcataatccgccacatattcattttacttatggtgattatgaatgttctattagcgtattggatcggattgtagacggtcaggctccagctaaagttattgcaaaagtaaatgagtggattaacttgcacgaggcagaaatactttctctttgggaaaaggcccaaaaaggggaaaaaataaataaaattgaaccattaaaataaacgcttatgttacgggttatagatgtggattatattaggaattacgagcttcttgttactttcagcgacgggagtaaaaagatcgtaaatttggaaccttatcttacaggtgaggttttcggggagttattggataaggaaaaatttgttcaatatggtttaacccgtgctactattgaatgggccaatggtgccgaccttgcaccggagtttttatatgaaattggtatagctgcatatttttagaccctatgaatgattgtttagctattcaagataagaaggaagaaactttcttatatcggatttttatttctcacccggaactaaatgcttctgcggtggctcgacgtatgggaataagtcaaagccttatgtctcaatatataagtggaataaaaaagccctcacaagaacgggaggccctaatagtaaatactattaaagatatcggtaaagaactaacgatgattgtatgacatacgaagatattttatttttgatcggctttttcctggtaatattttttttcgtaggatgtaagcataaaccggctactttatccgggtggcttgcttttgcctttctttcctttatcgtgacgcctcttatatcggttcctctaacctggtacatttgctggatgatagatcgggcaacaattaaggataaagaatgttttgatccttcggattttacctttaagagataaaatactttcttcttagtataataagcctgtagaatggttctacgggctttttttgtgtccttttccgccactttacaccaggataattttgccttataaaatttactcttatggcaaaattaaaacctgactatatcgaatgggtgttaaccctgaacgcctccgatgcgcagaaggaaatacataatctttcagaaaagaacaaggagctccgggatagcaataaggagataaaaaaggctatgaccgatttaatcgccaccgggaaagctggcggtaaacaatggaaaaggcttgatgagcaactgaaagaaaataataagacgatcggcgagaataacaagaagattgccgaatgtgagaaacggctggataaaaccaccatgagtgccaaccagctggcaaggaaggcaaacgccttgcggaaagagcttcgcgatacggtgaaatccttgcagccggaaaaatatgccgccctggagaaggaactgaaagaagttgaaaaagcatacggacaggcaacgaagaaggcggaaggtttcggcggttcccttctttccttgaacaagataaaaacggttctggccggtgtgtttgtcactatcggcgcaatgataaccgggcagattgtcggcgggctaagggatgcgatcagtactattatagagttcgagaagaaaaacagtacgttggccgctatcctgggaactacgaaaaaaagtatcaaggatttaacggatgaagcgcgccggctgggtgctactacttcttatacggccgcacaggtaacggcacttcagatagagcttgccaagctgggatttttcaaagaggatattaaagcgatgacgccttccgtgttgaaattcgctaaggcggtggacgcggatcttgcctcggctgctacgcttggcggtgcaacattgcgtattttcaatcttgatgcagaagatacggaacgggctgtttctactatgactatgggatgtaacgcatccgctttaagtttcgagtacttaaatacggcaatgtctattgttgggccggttgcaaattctttcgggttcacgattgaagaaactaccgcccttttgggtgctttggcaaacagcggttttgacgcttcatcggcagcgacggcaacacgtaatattttgcttaacctggctgacagtagcggcaaactcgcacttgctctcggtggtccggtggataatctggaagacctggtaaaaggacttaaaaaattaaacagtgaaggaatagaccttaataaggccctggatttaacggataaacgttcggttgccgcatttaatacctttttaaatggtactgataccgttttaaatctccgtgatgcagtaaccggagccgaagagggatttaacgccatgtccgaagaaatgggtgataacgttcaaggtgcattaaaccggctaagttcaactatcgaaggggtagttttacgtttctatgaatcaaagggtattctccgggatttaatagaccttgttacgcttatggtggaaggtgtagggggtatgattgacatgtttaataaatggggtgttgtcacttataccgttaccgcttatctggtttcttactatggaggactgaaaatcactaccatgtggcacgcccgttttaaaacggcgacccttgcttcggtcgttgcagagaaagcgcacgccgtacagctttatatcagccgggcggctactctgacttatgcggcagcccaggcactattacacaagaatactaccagatgtaccgccgccctccggttaatgaggatcgaacttttgaagaatccttatgcagccgttaccgccttgatactctctgccggcatggctatttaccagtttactaaaaaactgaaagaagcaagggacgcacaggctaattttaataaaatagaatcggaagtttccgcaaccttacaacaggaaaaggaccagataaaaagtctcacaaaagcgatacatgacacgaatttaagtgtggatgagagacgggaatatataaagaagttgcaggagatcgttccggagtaccacgcttcaatcaaggacgaaggcgggttatatgatgaaaacacggaggccattaagcgatatttaaaggcgagagaaaacgaaatgaagatgaactcgctaaaatctcttatgcagcctttgtatgatgaaaaagctaagctggagttcgaaagggacgagctggaggaagaaatcgccgatctgaataaaagaataaataaaaatccccggttgagtacggcaaaaataacgaaggtttcacggcttaccattgacaaagcggaagttgaggaagatttggcaaaggtaaataaaagactggaaccatatattaagaaactggaggaatggcagcgggaatcagttaagatcacgacggaaggcactaaggcgaccggtaatgcagtagaggaagaaacctcccttataaagaagctggagaaaaaaaggaaagaggttcaggaaacatggaaggaggatactaaagaaaatcttgccaagaaaaacagggagatagaacgtattgatgagcagataaaacatttaaacgagctggggaaagtcaaaaagaaagtggaagccggggagtataaaaatacggaaacggccgccacattaaaacctctggagatcgagcacgaaaaacgtatgcttctaatcaaagagaaccgggagaaggaaaataagacggaagcccagtatattctcgaagggacggcggaaaaccttcgctattaccgggaacgtctcgatgccctccaaaagctggaggcaaaaacaccggctaataaaaagaaattactcgatgaaatccacaggctcgaaacggaagcacagacggccatttttacggaaaccggcaagcaggaggacgcccgtataaaactggtacaggagaaacggggcgaacggttaaagatcgaaaccgcctattacaacgtccagaaggacaccatggaaaaagcggtattaaaccggagtatcacgcaggaagccgccgacgcctatatgctggaagttgaagcggagcacgccgcagaacttctggagataaaccgtacttaccagaatgatattgccactttggaaattactggcaaacagaaacgtatagaaacagcgacggaagcggccgacgccgtgcgtgagtctgaaatgaagttattgcgtgaccgggtggctatcgcgcaaatggtggagttgctgacatccgacaaatccgggaccgaagggatgaaagaacggtacgataaggaggtaaaggcagtaaaagccaaatacgacgccgccattgccatagcaaaggccgccggcctttctactgtggagctggagaaggcgaaacaacaggcgataaaacagctggatttccagtaccagaatgatctttaccagatacaggcggaaatcgggacatcctggagccaggagtacgaccacgaactggcaatgttggaaaatatgcacgaccaggggctgattgacgaaaagacatatcagaaaaaaaggctggaactgggaatacaacatgctaaaaaatactttgacttttattccggtcttgcttcttccgtggtggaagccatgcagcaggccgaaatcgaccaggtggaagcaaaatacgatgttctcatacaggaagccgaaaacaacggggaagataccgccgccctggaagaagagaaggaaaataagaaactggaaattcaaaagaagtatgcggatgtaaactttgctatcaagtgttcccagatcatagccgatacagccgtttcgattatgaaggcgtacgcggacctcgggccgattgccggaaccgttgctgcagtaatgcttgcggctaccggtgtggcccagcttgcatcggccaaggcagaacgggacaggattaaaaacatgtccttgaaaaacaccaccggcagcaagaccgccacggctgaacgtgttgtttccggttcttccggtggtgggtattatgaaggtggttacaccggtcccggcggacgttatgaagtggccggcgtggttcataagggggaatatgtggtaccacagccggaaatgaataatcctaaagtgatcgacgccgttagcactatcgaagcgatcaggcggcagcgtaccagtgccaacccgttaccacagaatccgggtgaatattatgaaggcggttacgtgacttcccctgcaggtgattcttcctaccgggagttcctggaagcggcaaaggagcttcgcgcctcctgtgaggctatcaaattgataaaggcctatatcgtttaccaggatttggagaaggccaaagaaactatagataacgcccgcgacacctttacacgcggaaaataagtaatcattatgctaaagattaagacgaacaaaggttatctggacttagggggtgactttaccgtacagatcgacgagaaatcccccgtcatgaacgaccggggatcacaaaccgtaccggtcacggttcccgtcactgccaacaatgcagggataaccggttttgcccaccggctcgacatgggtgtaaaaccgatgaatgaagatcagacatgtacggtattggacggggtgtataaacgtaccggaaagataaatatcgtttccgccggcaggacggaaggaattactttaaatatcggttttgacaattcggaagcctacagcgcctggaaagcaaagaaactgaactcgatcacattacccagcataagcggcggtaccgttagcggtcttatgtcctctataaactggttcttcacggattcccatgaagattttgccatatttcaaatagtagtcaaaaatgattccaaggacggcacgtattacccgcaatacataaaccgtatcactttggattcaaacggtgaatatgccttatgctatcaggcaaggacggaaacactactgataaatgataccccgaccgaaacgagtttaccggaagggtacggcgtggcccccttcttatacgtgcaccgtgtcctggactttatattttcagaatttggttatactataaccgaaaatccttttaagacggacaaggaactttccagcctggtaatcctgaacaatgccgccgactgttgcgtgacgggtatcctcaattatgccgatttaatgccggattgtacgattgaggactttttaaacgcgctgtatgtacgtttcggactggtttataatgtctcttccgatacgaaaacggccactttaagactgatccgggatataatggaagatgaacctgccgttgatctgtcccggaatctgacggcggaaccccttatcaattatgaaacggcccgtcagataaagttatcggccaaaacgtcttttaccggtgccgcgccttcggtggaacggtacgaggactatatcaaggggaacgaaaaaatggttatccgtgtaagccgtttcgatccttcccaggcctccgtgtggctgaactacgagaagaccaccggcaactggtacaaatgggattcgggcaacaagaagcatacgttatcatcatccagtttctttaactgggaccggaagacggaaaacgtagaggacgaggagctggcgagcgatgatgaatgcgtgtttatgaattttgccccgaacggccttctttccccgtattacctggccgggtatgtgcaccgttatacctacctgaaaacctcttccgatgatgaagaggattcggaaaaggaggagacgccgctttccttcgctttcgcttttacaaaggccgttacggaaagtacggattattccttcggttctattttaccatacgctccggacggcggagaaattacgttaaaagacggcagcaaacatacgatatcgcttttattccagtttgaagacggtctgtttgccaagttctggcagaagtatgacgccgtattaaggcactcttttaaccaggtggacacaaacacccttttaccggttcaccagcttatgaaaatggatgtcttgaccccggtagccctgcgggggcagtacatgcttctggacggcctttcctattcgcttcctgcgggtaaactggtaccggtaaacattacgttgcgttccctgcgtctgatcggtccctataatctggataatgaacagggcattcccgtgtggggcggtgcttcctacgtgtgggtcgtatattcttccaatttgcagagtgtacaggccggaagggtggaatattgggaagattattaccgttatcactggatgtatgctgtgtacggttgccgtgtatcgaatacgatatatgacgggtatgttacgccgtcaacggatgaggatatattaaaaaatccgcccaccgcacaggataacatcatagaaaaaacttacaaatgtaagatagaggttgaaatcgaggtaaacgagcgttccggcgcggccaactatttttgttacgaaacggaagaagtcgaataccaggtaaggtttgtcgcatcgagggtgcttagctgatcccgtcctttattcttcctttgataaacccaacttttgcagcatggaaaagcagaataatatcatccttgccccgtcatcttcacaggtgacggagctttataagctttggagggaaaaccatgcggggcggctctcggacttttacaagttcctgacgtctcccacggatcagcgtgatcgtttcctttccggacttgaaaataagagtgagtttaacggaatattcatcgttaacacctttgaattatgagtttgacagcaaacattgatccgacggaaaacgcctttaccggaaaccctgtttatctttcggtagaaactacttctatggcgacttacaatataatgtatttcgtgaactttgaatttatgcgttccatatttaccggtaacggtaatggaagtttcaaggtgaatatcgcggaggtcctggaaacgctttttgttgatattcccccgttaacggacagttccgagatgttgataagcctttccgataaacggtataacaaggcggtcgtcacgatcacccttcaaaatgaggaggaagaaacggccactttggttgttactgcctggcgtggcggtatatccaaacgggcttttaagaaattgcatgaagaaggtaataacatcttttctttgaagttcttgaatgaatcctgcaatttcttctttaccacccggagcaatgactggcgtataacgatgcgcgagacggaactttacccgctctgtttcatctatccggagcacgagctgaaaataacggaacttcttaccggacaaagccttgcagtaccaggcacggcagggaatttctacgccttgaacctggaggccgtaagacttaaattctttaccgattacggggtactggccaacctttttgacgtgtatagcggtgaaacgttcgctctccggatcgggatcgagcaaagcccgacggtccgcgagcgttaccggctccggttcctgaacagttacggggtttacgaggtgttttccctggaaggcgaggcgagcgtaactcccggcatggatgaagacgaagacgctgttttccggcgttacgatgaaattaccgatgattattattcggatcgcatacgtacggagatacaggaagccgtaacggttaagacgggattcaaacgcccgcaggaaatacgctttcttcttgacctgctttcctccgatgatgtctacctggcaggttacggccgggaagagatcaaggtaattccttcggcggaagagttttcttaccgtgtccgtccggacgcgccgcagaacgtgacgttaaagctcacgtttgccgagaaggagtccaactggacgggagaaatcacggaaagcggctaccggaaaccgcgggttcattccaaagagttcagtaaacaatttaattaatgtatctatatggcaacacaggagtatatcgatgatcttattatagtcattgaaaccgcggaggacgcggaaagcgttaccaaccaaatggtggcggcggttcttggcttcttgaacgaacacctgaaactggtttcccagggtaaggaaatcgaggcggaggaagccgcccgcattgccgccgatgcagccttgcagaaggctatcgacgccgtttctctacgtatcgaccggcttgtcggcaacaacgcttcgcaggcaatcgacaactttaacgaaattcttgcttttctggacgggcttaaagacagtgattcgctggccgcattgctggccgatatcaacgcccgtatcggcagcgaagacggttcacagagtgaagacggttccctttggggaaagctgaaaagtctgtcccaggatattagcagttgttccgaggacataagcacgttgcaggcagaccgtgacgaaatgaaacaggagttgcaggaaactgccgggcgtctgtcttccacctttaccaatgtaaacaacctcttgaacgccggcagcgtttatagtgatctgtcgggggtgtttgcagcattgaaaacggcggggaagattgacgatgtccggaaaaacggcgtgatcctttctttcctcactgccgacggctgggtgacgaaacaatttaaaggcaatccggacacggattttgagaatgtcgaaaagtgggaggatttcggcagcggcggttcaggcggcgggaatacctataatgtaaccggcagtgtgccgcttacggaaggtttctataccctggcttccgccattgccgcggtaccggagaagtggcgcggccgggggcgtgtcatcacctttgaaacatcgctcggcaaatgggagacgtaccagtttaccggaaccgccctggatgcctgggaccaggaggcgagctgggaagagttcggcggcaaaggaacggtaaagagcgtaacggtaaacggcgagaagcagacgccggacgcggccggtaatgtgaatgtaaacgtggatatcctggaagtggacgagactttgtccaccgattccaccaatccggtagaaaacaaggtagtaaccgcccgttttaacgaggtggacgcttccacgctgtttaacgtaaatgcggaggtaagcgaggatgaaacatccgtccgtctgtctttccagaacaaaagcggcgcggaaattaccgccgtggatatcccggccggttccggtggaggttccggcgaaacggtggctactaaaattgtcttgaatgcggctgtagataacgccataatcaaggaaggcggaaacgcccgtcttacttatacatacgatcaccaatacaccacgggggatgaaaagggggaatctaccgggcaaaaggcggatatcaccgttacgatcaggcgtggaacaactaccatgtattcccagacggtcagcgatgtttccaaaggcagttacgaactggacctttcaagttacttgcttgttgggaataccgatatttacgtagtggcaaccacaaccgatccgactaccggcaagaaacagacccgacaggcgtttacatccgtgaaggttgtcagcctttcccttaccagctcttacaatctggccggggccatagccgcaggcggttataccctggccgacacgattaatatcccttatgccgtgagcggttccggaacaaaggtcgtcacgctttatctgaacggccggcaacagaacgcgcacaccattacaagatcgggaacgacaaacggcagtttcagtttgtccccctcttcgcttgtgaccggccggaataccgttcaaatggttgccgaaatggaggcttccgccgatctcgtgttaaagtctgaaagtatctatattgatattctgaaatccggaggatcggcaccgttcatcggcacgatgatgagttttccggacggccgtatttttacggaggaccatcttgttccgcgcttggaagcggggcagtacgaacaggtaaaatttgactttgtggcttatgatcctgacgcaacgccggctcaaatggacgtttaccgggacggggtgaaaacgcagtctgtcagtgtggcccgtactacgcagacatataccaaccgttttacggagcagggcgagatcactatgaaatttaagacgggggccacggaatacccgttttatatcgacgtaacggaaagcgggatcgacttgcaggaaactaccgccgggcttgtactgaaactttcggcagccgggcggagcaacagcgaatccgatccgggagcctgggattatggcgacatacatacgacattttctggtttcgactggagcagcaacggctggacgggtgacgccctgaaacttacgggaggcgcgaagattgaaatcgggtaccggccgttctccacggatgcaaccactaccggggctacctatgaaatggaaattctttgttcgtcggtaacggaccggcagggggtgatactggactgtatggccggcgatatcggtttccagatgacaacggagcaggcccttatgcgtgtttccggcggtacggaagtaagtacgaagtttgcaagtgatatgaacctgaaaatggcctttattgtcggggccaaggccggtaagcggttgctggaactttatgtaaacggaatccgttgcggagcggtgcagtatggggctaccgaaggattactgcaggcggaaccggtgaacatccgtttgttcagtgatacggcggatgtggagatcaggaatttccgtatttataaccgtgcgcttacggatgatgaagaattgaacaattacatggtagaccggactacgtcggacgaaatggtcctgttatttgaaaagaatgatgttacgggggacaacggtacggatatcgacatagacaagttacgcgcccagggaaaggcggttatgcgaattgtcggcgatgtgaaccttgtcaacgccaccaataacaagaaattcgaggtaccggtcgatatctatttttatagcccgcagggtaaggagtacgattttgtagcaaggaatgtcggtctaagaatacagggtacatcatccaccacttatccgcgtaagaattaccgtctttatttcttgcgcctggaaaaatacggtaccacgctggaagttaacggcgtggatgtgccgtcccttgaatacagtttcaaaccgggagcacggccgatcagtatattctgtttgaaagcggacttttccgattcttccggtacacataataccggtgcggtgcgtattgtgaacgacgtttggaagaggtgcgggtggctgacaccgccgcaggctgcatataagggggaatatgacgtacgtataggcgtggacggtttccctatggacctgttttatgacaacgacggcaccggtgcgaatacttatctgggaaaatacaatttcaataatgagaagtcggaaagtgcgatcatttacggttttgaaggaattgaaggattcaacgacgaagcggccctgaacgggcagcgtaacaaatgtatctgtctggagttcctgaacaactccgaggccctttgtctgttcgggactaccgacatgtcttcttttgatgatgcgctggaatttcgtttcaaggcggacactacctgggcggatgcacacgaggacgacaaggcggcagttacaaggctttggaactggatcgattcatgtaaggatgatcccgccaagttcctggcggaatataaccagtatttcggtaatgacagcccgtttgcatggtatctgattaccgattactttatggctgtggataaccgggcaaaaaacatgatgctggcgacttgggactctctgatctggtatttccttccttacgatatggacacgctgttcggtgtgcgtaatgattcggtactgaaatacgaatataccattacccacgaaagttttgacgatagtatcggtagttatgcttttgccggccatgattccgttttatgggaactggtacggtcttgtccggacaaattgcgtgaagtggcggaaaccttgcgtagcaatatgagccttgaatatgtcctgcaagtatttaacgaggaacaaatgggcaactggtgcgagcggatttataacaaggattcggaatataaatatatccttccgcttaccgaaggggtgacaaccggcagcggaaccagttattataattatctgtatgccttgcagggaagccgttacgcgcaccgtacttataccattcagaaccgtttcgcccttctggatagtcaatacgtggccggtacttatcgtcgtgacagcttcgcggcttatttcgggtataagttcggcagcgataaccggaaaattcggattacggcctccgaacggtattattacgggtacggttacacgtccggaacaccgcaccaaagcgcggtacttgcagaaacggccggggctgtggtggaactgacaatggacacggatttaatagtaaacgatccgcaatatttctacggtgcaagccgtattcgcgggcttgatctgacggatgtagcccacgccattgtcggcacgttgaacctgaacaactgtacggccttgcgtgaactgaatgttagctgtgaggccggacagatgacacttaacgcccttctggtgggtaattgccgtaaccttcgacaactcgacatatccgggcttaaatcctcttcctttaccggtatggacctttcaagcaacaccaaacttgaaaccttcctggccggtgatacatcccttaccggtgtgacattcgccggcggtgcgcctctggccgtttgcgtccttcccgcaactttgcagacgctggagctccggtacctgaacaaactgaccaatgcagggctgcagctggaaagcacggcaaatatcacgcgccttgtgattgataactgtagcctgatcgactggaacacgttgttacagcaatgcagcgcgaccagctatctacgaattaccggtatagatatggacggggacggaagtttgcttcgcgggcttatgacaatgggcggtgttgatgaagacgggggaaacgtgcagacgtgccgcctggtgggtacgtaccggctgacccagtccatgtcggacgaagagtacgccgccacctgtgcgcacttcccggaactgaatatcattcagccgcagtttgtctgcataaaaatagaccagacggtagaggacggggaaaagattacaaacctggataactctaccggatatgactataatacggaatttaccccgtcttcccatatcctggaggtgttggcgaaaagacattgcgttctggccaaaaagacggcggagggtgaaatgacctgttatccgcttcatgatgagagccggaacaaatacgccgacagtgacagcgtggagaacgccacggatgcagtattaaccggatcggaaggcgaagtttacgtatatgagcctcattactggtacaagggagtaacggacgtgctgaaccaatgtctgtacggttttatttcaagcaatgaggatgcgccggcagcggcagggtacaccagtgtaaaacttacccgcgaagagctggaggtaacggaagggatcgggattcgtaagaatacggattacacgacccttgaagaggcgaagaatgaatacgaatccggatcgttcgccctggtggacgtgcgggattacaagcaggtccgtttccccggtctggcttccactctttacggggctgcatttatagatgatacgggcaaaatagtaagtcgggtaagcgtttcaaacgcgaacggttttattaatggtatgtacctgttttgtgctgttcccgcaggggctactttcctggcctttactttccttaattcggcggccttcgatttcgttttactcacaacgtcggaaagtgtggaagcgatcgagccggactgggtagagcatacggaatgcctgggcggtgcttatgaagcttacttgattgatgatgtattgcgttctgtcagtggtgtttcaagtgtaggaaccatttcacagagccaggcaatcaaatacgcccagaacaggggcaaaggtttccagctgttcgactgggagatgcacaaggatgtgggtaatctgcatttctttaaatacggtaataccgattcgcagggagtttgcggatatggaacaagtaattaccaaaaagtgacgggccttacaaatgcactggggatgcgtgatacggtttcttattataaggaaaaaggcggttccaatccacaggcggaaggtgcttaccgggacggtgtaaattatcagtccgtcaatgtactgggatatgaaaatttccagggaaataaggcggaatggttgcagtatgtcacggtaaacaagacggcagcggacggaaggtggtttattaccatgccggacggaacggaacgcgttgtacagggaattactgtttataatgcggatatttatcctacccacatggtttggggccggtatatggatttgattgcagccaaagaaggcggttccacttcttcacattggttcgacaggttctatgtgggtaccgggctttctcgtgtggtgtatcggtcgttctacaacgcgctcgcgttgggcggtgtttcgtatgcgcacgcggcttacgattcatcgagcacgtatgcgtacctcggcgttcggcttgccttcaggggcataatacgctgggcgggcagcgtcgcggcctttaaagccataaatcaggctgattaagataaaaaaaacaacgtaaaacgttgtgcgggtagcgcaggcgtccggaagtaagacgggtgccggtgcttcctgaaagtacaaaggcggatttcctcatatacactcgtgtggtgtatcggtcgaacaacaacgcgaacgcgttaggcggtgtttcgtatgcgaacgcgaataacgattcatcgaacacgaatgcgaacatcggcgttcggcttgcaaacaattaggataaagaaaaagcgcataagccttaaaaattggcgtacaacagtggggacgtgtccccggcgtggagccaagaggaatgagcctcgccaacagcagccgtttacggctggaaaggggaaaaataaagcgcagggcaatggggtttggtaggaacttttttcgaagaagcccggcccggggaattgaaggctaatttattatcatgtggagagaagataatattatagaagagattgtcgaggactccaatatagaggacgccataaaaacggtattgcgtaaaagaagacgaaagcgcagctttgccgggcgtagaatactggcggatgtcccgaaggcagtagagaggatcaggaaacggatcaggagcgggcggttcaagctcggaggatatcgggaaatgaccgtagacgacgggccgaaggtaaggatcgtacaagcggtttccctggaggacaggatcgttcttaacgctgttatgaatgtggtggaccggcatttgaaagtacgttttatccggactacttccgcatccattaaaaacaggggaacgcatgaccttttacagtatatcgttaaagatataaaggatgatcccgaaggaaccctgttcgggtaccagttcgatataacgaaattctatgagagcgtagaccaggacgttttgctggatgcagtgaaaaggatgttcaaggataaaatattgatcggaatcctggaagagtgcatccgcatgatgcctaaaggcgtaagtatcgggctaagatcatcacaggggctttgtaatttgcttctatccatttacctggatcaccggttaaaggatcaggaggcggtagcacattattaccggtattgtgacgatggtctggtgctttccggtagtaagaaatacctttggaaggttagggatatcattcatgaacagacccggaaagctcgcctggagattaaaagcaatgataccgttttcccgatcaccgaaggtatcgactttctgggatatgtaacccgcccggatcatgtacggttaaggaagcgtaacaaacaaaagttcgcccgcaagatgcacaagattaaaagcaagaaacgtaggcaggagttaaccgcttcattttacgggcttacgaaacatgccgattgcaagaacttattttataaactaacaggaaagaaaatgaaaaaaataaaagatttgggctacaagtacaagcctaaagacggacggaaacgatttaccgggacaaggatcaagtcgcccgaactgatgaacaaagatgtgatcgtacttgattatgaaaaggatgtgccgacgaaaaacggaaaccggactgttataaagctggaactcgacggcaaggagagaaagtattttaccagcctggaggaaacacttttcatttgtgaatcagcggcaaaagacggagaactgccttttgaagcacattgcgaaggtgaagtaagtgaaaaaggattgataattatacattttacttgaaatgatacgaatttatgcagacagcaaggcggaaccggtaagatgtaccaaccgccgccggggaatctggcgtattacgtgggattaccaggaaacagagacacccgaaggagtgcaacgtagttacatggaagagacgttcgatcatctacccgcactggcagaaatcaaggcggttattaatgaatggtataaccggaagataaccgacacgatcgaaagcgggtacgtatggaacggcctgaaagtctggctttccatggagaaccagatgaattataagacggcgtacgatcttgccttgcagacaggcggggaaaaccttcctgttactttcaagctcggggaagaagacaacccgacgttttacgagtttgcaagtatgcagcaactacaagagttttacaccggtgccgtgaaacatatacaggagacacaaaaggaaggctgggcacttaaaaaggcgatagactggagcgtttatacgttggagtagaaaagtgaagggggaagcaggaaacacgtttccccctcacttttggggttataacatatcatcaaaggcgtgtattcccacttcgcgttcatcctccagaacatgtgcgtaaaccattgtcatagttatagaactatgtcccaaaaggtgggatagtgttacgatatcatgtgttttcttataatacagggtagcgaatgtatgccggccggtttttgaactgatatcctttgttattcctactttaccggctatagttttcagtacccggtttatatcctgatccgtgggaaggttcataaacaggttgccttttgtacgtccggcccgataatattcatagatataacgtgccgggtccgataaaggtacagttaccggtattttggtcttgcctcgtgtgtagtgtagttcattccctatgaactggtttatctgcaatgcttttgcatcgcctatatgcaaagaagtaaaacaaagaaacagaaaaaaacggagtacgttctgggtacattcttccaagcggccggaccggtacaaagcggtcaggcggaggagttcttcttccgtcaggtatataacttcacttttggggcgacgtatctttatggccgcgaacgggtcatggtccatataaccgccacgtatggcggcacctacatatattttgatagtagccatgttacgccatgccgtagaatccatgttacctattttgcgaagatatgcaaagaaagacaggagaaattcgtgggtaatctctgaaaatacaaggccgggtgcgaatgtttccagtttcttgatgatagaaacgtgatgtttccaggtaccgaaagaaatagttttgctaatttgtttgaggtaaacccgtgcaaaatcaaagaaggtaccaaaatcggagggattgttatactggcggaagaaactttcttttgtcagcgtctcatttttaagacgggcacggacaaatatatcgcttactcgtgaacggatattggagatgattaaatttttatccttactttctttgtcccggccttttatcacttcgttttgctcatcccattctttagaggtgacacttaaccttaccgcgattcttattttctcgcggttgatataaaattccacatacagggggagccggtcggttttgccttttttgccttgtcttacaactcttattgccgtcatttttatatgcctattttatgcctgtagaggggatatgcctacaaatatgcctacacaggcaggttattaaaagttaaacggggcgaaagtaaaacgtttaatatcagctatttaaaagaaaaatccgataacatttaactgttaccggatgttaatagtgattccgttgcgattcgaacgcaagacccacgccttagaagggcgttgctctatccagctgagctacggaaccagccttaattgcggtgcaaaggtacgcttttttacgaatattgcaaatttttgtatcaccttttttcgttacctatgtataaaaggctcatttgctacataaaaagtaatgattagttacctttacaaataagatacacggtatttatatacagatgtattaaaacattttgcaaattatcaatgttactaattataaaaagtaaaaatatggaggaatattcaagtaggaaaagtagcattgacccgaaaatgaatgaaagagtaataacaactaaattttaaagagatggaatgggaaaatcagttgatacaagaattgcaatggtcaaataaaatcagcaataaggcgagtaaggaattggtagcccaggagattgccggactggccaaagacggtgatgtcataggagcaggctccggctctaccgtttatctcactttgtttgcattagctcaacgagttaaacaagaatctttgcatatagaaatcattccggcatctgccgaaatttcgatgacatgtatacagcttggcctgccgcaaactactctgtggaataagcgtccggattggacattcgacggtgcagacgaagtggatccgcataataacctcatcaaaggacgtggtggagccatgtttaaggagaagctcctaattaaaagcagtggtaagacttacatcattgtcgatgagagcaagcttgtcagcaaactggggagcaaataccccataccggtggaagtatttccacatgctctctcccatgtggaaaacgagatacgcttattgggagcttcaaaaatcagcctacgtcttgcagaaggaaaagacggtccggtatttaccgaaagcggtaatttcattcttgacattcatctcagcaacattgttcctgatttggaacagaaactgaaagccattaccggggttatcgaaagcgggctgttcattggttatgacattacagtcctaatggcaaaccgctgatgtaccaaagtacaaataaggcagtccatgccaatagaatgactaaagaatatctccaagtatacttcagtagtgaaccataagtggattgcctatcatattgctgcatataggtcaagacaagtggcatgtagaacataaaaggtgttatggcatttgttgcactgtcacctatacggaacgcacattgggtcatatccggcgaaatgcccatacttgccaataccggaacaaaaatgaaagacataaaagcccatttagctgtggcagataccataaagagattgaccagcgccgtaaaaagaatgaagagaatcaatatccataaactactcaaagaggcggaggacagcagattagcgcctaaaatggcaatgcacttgtccaagtgggaatattcaaaacaagcaaacatctgtgaggcaaagaaagctatcacaaaataaacgcccagcagtttcatcggctgcgtaagtccttctatcacatcaccgtccgtacggtatcggccggaggcaaaaccatagaccatccccatcaaacctattccaaacgaaagcaaaaacagaataccaactataaacggagaacgaatcaacccaccattgacactccgcaatatcccccatgaagagaatgtagcccacagaataatggcaatatacagcaagcctgcaaatacagctcccaacatagctctccgttccttgcgggacagttgtttgtagccattaaaatgaatatcccctgcatacattcccaagtgcggcaacaagctcctgcgggtaatatgataaatgatgaatgcaagcaggaacgtggaaacaaagagaaaataataattgcacagcggtccagtctgccccggagcaatattcatcctatcagccgcttcttgcgttacagaggcaatcatggggtctaatgtactcaaaaacacattagcgctatagccacaagagactgaaacataagctgtaattatacctccaatggggtgcagaccgacggactggaacaaagttgcagctatcggcaacagaatgatatatcctgcatctcccactatattggacaacagtcctaagacaatgaccagcagaataatgcgccaaggatcacgtggacgtcgtacccccctgcgaatacatgcatcgatgaaacccgaatgctgtgccacccctattccgaacatagccacaatcaccagccctaacggagcgaatcccgtaaaattggttatgacatggcgcagcagccagcgtatgccctccggactcagcaggctctgcacccgtatttcttctccagtctgcggttgcagcacgctcagaccatagacatcgaatatccatgaaaggaggatgactgccagcgtcagcaggaagaacatcgtagcgggatgtggcattcggagtttactcatcgtcggcttccagattgtctatattcaagattcgaagttccaatgcacgcaccaccagacgagtggcattcacccccacccgttcactaggcgggaaaagacggccgaccaagtcattctgccgtttctccagcgacttgactccaaaaggcattcccctaagattggcaatcatttctttggtatagcccagtgccaaatgacggaggaaacgctcgtcatactcatcaatatcatagcttatgattgcttcctgacgttttgcatcattcaggacagatttcttgaagcgttccactatcttctccagtatcggatagttaaagaccagcttcttgccgtccatcactgcctgcacatcggttttggtcagcaactctccggttttcaggataatgccgtcggcaccggcctcaagtacgtccacccataacttctcattcaatatttctcccgtgaatatcagcacatgtactcccggataacgcttgaagatattccggcagatgtccaccccgattgtggtcgaacctcccaatcccaagtccagcagaacaagatccggtacgccggcttcaatcaatgtccagaactcctgctcagtcatagcagtacctattacctccgcattgggaatttcatggcggaaaatctcttccgtccctttcagctccaacttgacatcttcaacgatgattactttaaattttttgtcttccatatttcattttttcggtagcgtaaaatatattgtaaaacctccttcctttcccggttcggcattgatacggcatccccggcgtccggcaaactcgtcatggtcgcggataatctgcttgcacaccagatattccgtaccatacagttctcctttctcaccggccgtcatgcgggacaagtcgggatagaacaattggttcaattcttcacgggtcttttccctgcgcatatctgtaaacagaaaacgtataaattccccatcttcccgggccgacagacagacagctccatccagagttacggagcaagcctcgtctatcaggttttcaagcaggaaacgcaactggttccagtcaccggtaatccgtccttccaacggttgtatcttaaaatcaatatgcgccttgtttcccttatacactttgcggaaatatttcccggcagtagccataagttccggcacagatattgtcgcacgcctgaaagtcacctcttccaactggcgggaagcgcatgaactgagtgtcgtaaagatacctttgtaatactctatcaattcgctgatggcaaccaccgtttcccgctcctccgcttctgtctgtttgccggaccgcagtttccctatcagctgctttatcttgttcggataataaatcgtttcatgcttgatggtcgaaagacaattatccagcaccatgttctgtacatgcagcaaactgtcttcccaggaagctcgccgggcttcatcctgagccacttcgatgtcccggtatttcatagccaacttaaccactgcattaaagattacaatggagacataacgggctatcagttccaaaagcaaatggtcggtctcctgctccgtaccttccctgcgttccagacacagcacacctatgcaacgacacatattgcctgcatccacaacaagcggcaatgcttgtatacccttttccgatatgtacacttgctgctcaaaacaattctccatatatttccttcggacaggcaactcgtccacggcggtatcttccactggattggaagtgtattccagcttatgtgtagtctcgttgtatacagctatgcttaaccggtcgatactcaaaagttcgttcactgcatcaaaagcggaacctacaatctgccgcgggatttccttcaatgtatcctcctcacgctgcaacatttcctccgtatccgaaaccggcaacaaggaggcattgaacacctttccattaatttccagtacttgctccagattccagcggttcaccagacgtttacggaagtagagtatgtaatatcccaacagcaatacgaacagcaaaatcaccgccagcaaaatgcccaccatcttgttgttggtggaacgctccagctgccggcaatattcttccaaggattggtcttctcccaacagtttgtataaggtagtgtaggcagcattattataactatagtcatcccattgcttcaatgcaagaaatgagactgccgcttcattcctgatatccaggattacatggaaatccgaattgaacatctggttccaccaatccagttccgcaggcgtcccgtctcccgtcaacgtcatatagcgatgtataggatgggcgtattgcttgtaatgttcgttcaggcaatacatggccgaatctatgtattgtaaagccagttcgtattctccgtctacattgcagtaataagcttcattggcataatcggaggcttcgtccagcaaagcttcgtattcattctgtgcaagcagtgccaaagaatccggtaacacctctccggaagcaggctgttccacagcataccggcaggatgacatgcacaaagacaacacgacgagcaacaccgacacggacttacggataccggcaggcagacggaaataaaaacggctgccttttcccagcccgctctccacattaaacagacagaccttgaacaaatcattcgtcttgcgatatttttcaatgatgcccttacagttcatcagtccaaagccacttcctttgttcttcctcaattcctccttgtcgggagcgtcactcataccgatggctttcgagtcatatactttttctcccacaatgcgggctacatcttccggtgacaatccacaaccattatcctctaccgagatttccacataatcttcctcctgccgtgcatatactttcaccataccgccctgaggggtatatttacgggcattctccgccagtgtatttatcataaacaatgtaagggctttgtctgcctttacccggatatccgtaggctgcacctccaacgactgtctcttcatctcgaatgtacggcttcccttcctaagcagctcgaaaagttcattcaattcgaacgtctctatgttcaggctaaggcttccttgcttcatctttatccaaagggcaagaatatcattgtattcattgatggtagtaaccaactcgtcgatatactggtatttctcctctttgatccgctcctctttgatgaatcctttttgagtcagtttctgcacttcgttgatgatacggtctatgtacgggtgaattccgttgacaatagccatacatgctttctttatcagattttgccgtttgttccccgcgatgtgctgctcgtaaatgtagcgttgcttttccagtctgcggcgttcgtcgccaagggagatggacgtcatgccgttgtcaattgcccattggatatagggagttatcacccgtaccatcgcctgctcatccttgctcatccgacgcgggaacactaattgcccgttatctatgcggatatccttcactccaaacagcttttccaattccgggcagacagccgtccggatagagtcgacgatttcctcctcagtctgtgcatctgccggaatggatgccgttatcttctgacagatatccagcatcagctgcagacggcggagatgcactctgttccggtctttggaacgcttgttgaaaaaccagaagaagagggatacaagcacgaagcccacaatgaccagtgacaacacgacgttgagttgccccgcctccttttccaatgcctgatagcggctttccagttctttatcctggcgtgtatcttcaaggatatccaggtaaatattgcggttatagtctgatttttctttcattccgagtcctgcatacgaaacgctcaactgttcacgaatacgtgaaatccactcgggcacggttttcagtttctgctccatccatgccttctccgcacaaatcgtatctcgacggtcaaatgctttcagccagtccaaactatcgtggcagtcatagaaaaggcggtgatggtcatttacacattccagagcaagttttagcgtgtcaagagcttctgtatagtgactgtgggcattcaggtatttgccgatagatacatatgcacctgctatctgatacaaatccttgtattggctgaatttttgcaatgccaactgccccagacgcatgggaagcagcgaatctaccggtactccaaaacgtgtcaaggcatgggagcggcggtcttgaaaaaatgcgtaattatccggtgaagccatcaagttggcaagtccctgcactccattgccctcaaagtaaagatagcccttgcgcgaagccaactgccatgcggtatagagctcatcaaattctctcagtcttcgctcatccggtgtctcaccctcgcataaggcagcagaacctttgatgtagtgataatacaacagctgattggtatctgccagcaactcttgttttttagtaacttcattaatagaggctacagcttccggacgctgttgcaaataataataatacacagcagatacaatataaaattccgaacgggcataattcaaacgcatttgctcgtgttggtccacaaacagattgtcatcctccgctattcttttcatacggtgcaaggcactattgcgataatcgtagaactccttgttcaacgccgtccgctgataaatcttcatcaaaccgatgtcggcaataaggagttccagttcattcttggtcagattatagacatccatatgaaacttttcggcctgctcaaaatccatgcgcataaaagcacaaaagcccagattattggatgcttccgcttttccttgtttatagaggctgacttcacggtaggcccttgatgccgcatggcaggatgaatccaggtttttataacgaaaagcataagccacctggtttagagagtcgataaggcgtacttccttcatgggtgccgttcccacacacgaaaccattgttgtacaaaggcacaacaaccccgcaaaccatataaaagaaagtcgtttcataaagcaaagctacgaataaatccgggaaagaaaaataatttttatacaataactcttgttttatgtaacgggaaattcctacctttgcatgcaaattaacaaataggtaacatctattacacaaatgagcgaaaaagcaccctttatggtattctccggaacaaattcgagataccttgcagagaaaatctgcgctagccttgattgccctctgggaaagatgaacatcacccattttgcagatggtgagtttgcagtctcttatgaggaatctatccgtggctcgcatgtattcctggttcaatcaaccttccctaattctgacaacttgatggaacttctgctgatggttgatgctgctaaaagagcatcggcaaaaagcgttgtagccgttatcccttacttcggttgggcacgtcaggacagaaaagacaaaccccgtgtttccatcggcgctaagctggtggccgacctgctctctgttgcaggtatcgaccgtctgattacgatggaccttcatgcagaccagattcaaggtttcttcaatattccggtggatcatttgtatgcatcagcagtattcctcccctatattgaatccttgaaactggaagacttggtaatcgccaccccggatgtcggcggttcaaaacgcgccagcacattctccaaatacctcggtgtacctctggtattgtgcaacaagacacgcgaaaaagcaaacgtggttgccaccatgcaaatcatcggtgatgtaaaagacaagaatgtagtattggtagacgatattgtagatacagcaggaaccattaccaaggctgccaacatcatgctggaagcaggagccaaatctgtccgtgccattgctagccactgcgtaatgtccgaccctgcttctttccgtgtacaagaatccgcactaacggaaatggtatttactgatagtatcccctactctaaaaaatgtgacaaggttaaacagttgagcattgccgatatgttcgccgaaaccatcaagcgggtgatgaacaatgaatcaatcagttcacaatacattatctaaccgctccgcggttagaaattaaaaattagaaattaaaaattaaaggctgcgcggttctgaagtgaacattgcgcagcctttaatttttaatttctaatttttaattctaattctccagccttcccatcttgtaggttccttttcgtatcacctttccgttcttgtctgtttctacaaacggaccgtgtttcttgccttgtttgaagaagccttcataacggtttccgttcttgtcctcctggataccgctaccttcttccataccgttcacaaaaccgcctttatatttggttccatcggtctgaatcagggtaccttggccgttgaacttattgtctttccattcaccttcgtaagagtcacctacattccatttgtaagtaccgtatccgtcacgttggttatctttccaattaccttcgtaaacggcgccgcttgcccacgtaaatgtgccgtggccttcctgctttccatccttgaagctgcccacatacttgttgccgctggcatggtaataaatgccctctccggtacgttcaccttgaacataagaaccttcgtaacggtcgccggtatggaaaaagtaaatacctttgccatgctgcatgtcgtccttccagtcacctacatatttgtcgccgttggcatattcaaaagttcctttaccgtcccggacatcatttttccactccccgtcatatttggaaccgtcattccaggtcagtgttcctttgccgtctttcttgtcattcttccacgagcctacatacttggaaccgttcttccaggtatacgttccttggccttcgcgtttatcattcacccagtcgccctcataaatatcaccattgtaatagtacatggttcctttaccgtgctggtaatcctgaaaccacatgccgtcataacggttgttattcataaaatagtagatacccctgccatgctgctggtcttgaaaccattgcccctcatacttttcaccgtcgggaaacatatatgtaccgtagccttcacgcttgcccttcacatactcaccctcgtagacgtcgccgttcttgaaaacggtcttcccctttccattgggcttgcggccttttatttcaccggtatagacggccccgttatctttgaacgtataggtacctatctttatctccgaagagaatgtacttttcactttatcgaaaaagccgctttttttttcctgggcagtggctccaccttggcataagaaagccagaatgagtgcagtatatagatatttcattaattgataattgatagttgataattgacaaaggtaggatttatccggtaaaatgatgcgataactcccgctttttatgacatttttttgccgcacactatttcttttaatttctctttgcataaatgccgccctgcaagttcacggatttcttgtggagtaacctccttgacagcatccagtgcttcggcaaagtaggtatcctgcaagcccgatacctgcacaaaaatccaggcatctgccaacgagaatgcagattcataactacggcacatgtctcccaacatatagttcttcaccatggaaagctctccatcggaagccagctcgttctgaaggcggtctatttcatgataaacctcaccgataagaggctccacaaattcgttggcggcttcggcactgaccgccaacactccctgccccggatagggcatgatggctgcggagataccgtatgtgtatcctttatcttcccggatattggacatcaggcgactgccaaaataacccccgaacagtgtgaccagtacgcgggccttcaagtagtccggatgattacggtccagggaaagcatgcccatacggacggcactttgcagggcgtccggacgttcgatgaagatacgttttccggaggtggtaaccggatggaattctgtcttctccggtttgcggaaatccgtaccgaaagcctcgcagccaaacaaggactctatcctgtggatgcaatcaccggttaccttacccgagagatagatgctgcaattattggaatgatagtaacggtcataaaactcgcgtagcaccgcaggagtgatgcgccgataatcctcttcctgcaccagacgtccaccgggatgctgcccgccgtacagagccttcaccaatccgcggtgcgccagaaagtccaccttggaagagttgacaagaaactgctggatattgttgtctacaatcactcccagctctttctcgggaaataccggctctttgacgatagactccaatatgtcaagcgtttggggaaggtatttattcagagaataaagggtgacataggcatactcggatgcactggacaattccagccaggctccgtaatagtccagcttttctgctatctgggcggcatcgtagcgtcgggttccctcgcgaagcatgcggttcgtaaacaacgcctgcaagggctgtttctgttgccatcggccgcctgccatgaggagatcgatacgtgtcacttcattgtcaccggcattgagcacactcaatggcacgccattaggcaacttgatacgttccggtctttgcactgccagttgttccggttcaagaatccggggttggtcacttcggttcagcatgggctttctagtttacaacccgtggcttttaagaaattcttctgcccgttccaaatcctgaggagtatctatgccgatagtttccacatccgtgacacctaccttgatggtatatccgttttccagccaacgaagctgttccaatgattcggcaatctcgagggatgactgcggaagggcggttatctctttcagtacctctacgcgataggcataaaggccgatatgcttataatacgtatggttctccagccagtcttccttcgccgcattgcgctggtagggaatgatggaacggctaaaatagagggcattcctgtttttgttgagcacaaccttcggagagttcacattttccagtacctcgaaaccattatctaccgtaaaggatttcaccagagtggctatctgggtggccggatcgtcgaaacatgctttgacggcttgtaactgcgaaggctggatgaaaggctcatccccctggatattcaccacgacatcaaactgtcctcctatttttgtacaagcttcctgacagcggtcggtgccgcttttatgttcggtggaagtcattaccacctttcctccgaatgcttttactgcggcttcaatacgctcatcgtccgtagccacgtatgcatcgtccaagattcctgccacttgctcgtatactcgctgtatcacggtttttccacctaacaccgccaatggtttggctggaaaacgcgtagatgcgtaacgggcaggtatgattcctaaaaatttcattttcaatcttcgtttttttaaatgagagtgtatccgaaagtgttcatatactatcgacacatctccttatattctttattaattataacagttgtttcaatcctcgcaggatataatcacgtttcaaatcttttggcttatagacagtcccgtcacaagacaacaagtctatatccagccgtacaatttcctgctccttctcctcgggcttccttccggcttcccgttcgatggctttcaggcaggcggtgacttcctctaccggattatcggaagcaaagcatgccacctgattggagaacagattcggacggtgaaagaacaaaggtaccgtctcctcctcttccgagaaacgtattcccgaaaaaagttccgtcaagcgtctgcgagccagttccatgttctccctccgctgttcgttgctcccaatactaatcgtataatccattttttaaggtgaaaggggaaaaggtgaaaattgaaagtttacctttccactttcaattttcacctttcaactaattaaacagttcgtcgagtccctctatcggttcttctatatgggtgtctccttccagattcacatcatccttgcacgggtcatagccttcgggcaactggaatgtttcattttcatcatatcccagagatttgtcaccgagcactttcaccatgtattttgtccagataggcaatgccatggaagcaccttgtccgtgaagcatcgtatcgaagtggatgtcgcggtcctcaccgcccacccagcaaccggacacaagcgaaggcgtgaagcccataaaccagccgtcggcattgtagttcgtcgttccggtcttgccgcccatgtcggctttcacacctagacggcgcacacggcctccggtaccttcgttgacaacggcacgcagcatgaccagcatcttgtaagcgctggatacactgatgacttcctgcatttcgggagcaaaggttgccagcacgtttccatcattgtcctcgatgcgggtcacgaacagcggagctacccggatacccttgttggggaatgcggtataggcacttaccatctcgccgacggaaatctcgcacgggcccagacagagtgaaacggaaggtactatatcacggttgcggacaccgaaagtatgtataagacgtttcagattatagggattcagtttactcatgagataggccgtaatccagttgtccgagtttgccagcccccacttcacagtcaccatgtcaccaatcagctttttgttggcattacgcggcgtccacggttttccgttttcatcaatcagcgtgtattccacgtggcgcacttcgtcgcagggagaaaaaccgttctccatagccagtgtataaaggaaaggcttgatggtagaacctacctggcggcgtcccaccatggccatatcgtactggaagtaatggtagttcggtccgcctacgtatgccttgacatgtccgctgcgcgggtccatggacatgaaaccggcacgaaggaagaacttgtagtaacggatggaatccatcggggtcataatggtgtctttctccccttcccaactgaatacggacatctcctccggggtgtcgaaggctttctttatttcagcttcggtggctccggctttcttcatgaggcggtagcggtcggacaacctcatggcacgtcccagaatctcgtctacctgctcctgggtcagacggaaggtgtagggagctttcttggcccctttcttttccttgaagaagtaaccttgcagttccttcagatgctctgtcacggcatcctcggcatactgctgcatacgcgagtcgagcgtggtatagattttcagcccgtcggtgtagaggttgtatttggtaccgtctttcttggtgttcttttcgcaccatccaaagagcggattgttctcccagtcgagtgaatcctcgtagtatttctgcatctgccagccgcggtagttggccttgtcgggcttcttggcggtgagcacgccgcgcaggtattcgcggaaataagtggccaacccttccttgtggtccacacggttgtacttcagtttcagaggcaatgcctggagggagtcgcgctcggcttccgtaatatatcccgctttccgcatctggtcgagcaccacattgcgccgtccgcgggaacgttcattgtagcgcaccggattatagagagacggattcttgcacatgcccaccaacgtagccgcttcctcaatcttcaaatctttcggttcgcaaccgaagtaggtaaaggcagcagtcttgatgcctaccgcattgttcaggaaatcgaacttgttgagatacatggtgaggatttcctcttttgtatagtaacgctccagctttacggcaatcacccattcgatgggcttctggaacagacgttccatcacattgtcggcactgggagaataaagctgtttggaaagctgctgggtgatggtactgccaccgccggcattcttctgcatcaggataccgcgcttcactacggcacgcgtcagggcgtaggcgtcaatgcccgaatgttcggcaaaacgtacatcttccgtagctatcaaggcgttgatgatattgggcgacaaatcattgtatcccacaaacacgcggttttccttactataggaataagtacccaatacttttccgtcctcggaaaagacttctgtggcaaatttgtaattcggattttccaggtcttccaccggaggcatatagcctatccagcccttggctatggaaaagaatataaagacacacaccagcgaaatcagtgcgatgaaaatccataggattttgacgactttccttatcatgtttcagttgctaaaatcaaagttcaataatagggcaaaggtacggaaatatattggatgtgcctatgctttttatatctttttcaggataagatttccggcatccacaaaaaaaacgcccgtttattttaatggaaactctcagtgaaatgcaaaacgattgcaaaacaattagaaaacttgaagaaaaaatcggaaaggaaaaatacatcgtaatgagctataatacagattgggacaacgaaaacttgccctcgcgcgcgtaagaggagataagataagaagagaagagaaaaaacgacgttgtcgttaaaaagaacgacggcgacggcgtaaagagataccacacttcactgtccggaatgccacacttcgacaaggcaaacgccgcacttgactaaggcaaatgccacacttgaacattcgcgaaatgcggcatttactttgtcgaagtgtggcatttcggatgatgaagtgtggcattccggacaacaagccacacggttaaaaaaacagcccatatttcgcaaaaaacttccccgcatatttccgtagcccgcatattttccgtaactttacactctcgaaaagtataaatgaattcaacgatatggaaaacagaagtttagtcaccattgccgagcatagccgggaaaaaatcctctatatgctcgagatggcgaaagagtttgaagcccatcccaatcggcatatattggacgggaaagtagttgccaccttatttttcgagccttccacccgtacacgcctcagtttcgagactgccgccaaccggcttggagcacgtgtcatcgggttcagcgacccaaaggccaccagctcatccaagggcgagacgctgaaagacaccatcaagatggtaagcaactatgccgacatcatcgtgatgcgccaccacctcgaaggggccgcacgctatgccagtgaagtcaccaccgtgcccattgtgaatgccggagacggtgccaaccagcatccctcacaaaccatgctcgatctctactccatctacaagacacaaggcacactggagaacctgaatatcttcctggtcggcgacttgaagtatggccgtaccgtccactccctgctgatggccatgcgccacttcaaccccactttccacttcatcgctcccgacgagttgcggatgcccgaagaatacaaaatttactgccgcgagcacaacatcaagtacgtggaacatacggactttacggaagaaatcattgctgatgccgacatcctctacatgacccgtgtgcagcgcgagcgcttcaccgaccttatggagtacgagcgggtgaagaatgtctacatcctgcgcaacaagatgctggaacatacccgtcccaacctgcgcatcctgcatccgttgccccgtgtcaacgaaatagcctatgatgtggacgacaatcccaaggcatactatttccagcaggcacaaaacggactgtatgcccgtgaagctattctgtgcgatgtactgggcatcacgctggatgaggtgaaaaagagtaaaggagtaattcagtagaatcgtctaataacaaatatttcaagatgttaagcgaaaagaaacaagaattgcaggttgctgctctggaaaacggcactgtaatagaccatataccctccgagagactgtttaccgtagtctccctgctcggactggaacacatgagcaacaatatcactatcggcttcaacctcaagagcaagaagctgggcacgaaaggcatcatcaagattgccgacaagttcttctgcgacgaagagataaaccgtatcgccgtggtggctcccaatgtaaaactgaacattatccgcgactacgaagtggtggagaaacgcgaagtccgcctgcccgaagagttgcgcggaatcgtgaaatgcgccaacccgaagtgcatcacgaacaatgagcctatgcctacgttgtttcatgtcgtggataaggacaattgcgtcatcaaatgccactactgcgaaaaggagcagaccagagaagatattgagattatatgaaagaagactggaaacccggaacaatgatttatccgctgcctgccgtattggtgagctgcggaagcactccggaggaatataacattctgactatcgcatggacggggacgatttgtacgaacccgcccatgtgctacatctccgtacgccccgaacgccactcctacgacatcatcaagcggaatatggaattcgtcatcaacctcaccacgaaagatatggcacgggccacggactggtgtggcgtacgctccggaaaggactacaacaaattcgaggaaatgcatctgacaccggggaaaagcaccgtagtcagcgcgcctctcatcgaggaatcaccgctttgcatagaatgccgggtaaaggagattatggctctcggttcgcacgacatgtttatagcggatgtggtaaatgtacgtgccgatacccgtaatctgaaccctgaaaccggcaaactggaactggcggaaacgaatccgctggtctatgtgcacggtggatattatgagctgggagaaaagataggcaaattcggatggtcagtagagaaaaagaagtaataatgcgataaaggttttaagagatggagttgcgacgaatcttgatgggcttatatctgttggccttccccgccatgatgtggggacagactccggttgtgcccggtactgccgacgaagagcattccggacaccgcaaggaaactccggtcaatttcggtttcaaaggcggtttcacctcttccttgttccttgtatcccagttcagcgtcaacggagtgcccatcgacgaagtgcagaacaattacaagataggatatttcggctcccttttcatgcggataaacttcgatcgccacttcctgcaaccggaaatatcctacaacatcaaccggtgcaacatcaccttcgagaaacctctgcccgaagacgccgcatcaggagcccggctggaggaagcctccattacatcgtccatccacagtatagacatccccgtcatctacggatacaacttcatcaaggaggggccgtacagccttgccgtctttggaggacccaaagtgcgctatatatgggacaggaaaagtgacatcgacttcgagaatttcgaccaggtgaatatccgtgaaaggctgcgtccgctcaatctcagtttcaccgtcggcgtatccgtcaccatctcacgcgtctttttcgacttccgttacgacatggggctgcataacatctccaaaagcgtgacatacgatattccggccgacaacaacgctgcagacgaaaacacgaaaaacgaaatccgttttcaccgcagggacaatgtgctgagtttttctttcggagtgttcttttgacagtaaatttcttccttttctttcaatttattcatttatttcccgtaaatttgtgcgcttaataagagaacacagatttatcaaacttatctaataagcagaatgaaaagagatgatttaattttcgaacttatcgaaaaagaacaccaacgtcagctcaaaggcattgaactgattgcatcagagaactttgtaagtgaccaggttatgcaggcaatgggctcctgcctcaccaacaagtatgctgaaggataccccggcaagcgttactatggtggttgtgaggtagtggaccagagtgagcagattgccatcgaccgcttgaaacagatcttcggcgcagaatgggccaacgtacagccgcactccggtgcacaagccaatgcagccgtattcctcgccgtgctcaatccgggcgacaaattcatgggactgaaccttgcacacggcggtcacctctcccatggttcactggtcaacacttccggtattatctatactccctgcgaatacaatctgaaccaggaaaccggacgtgtggactatgaccagatggaagaagttgccctgcgcgagaaacccaaaatgattatcggcggcggttctgcttattcccgcgaatgggactacaagcgcatgcgcgaaatcgcggacaagataggtgccatcctaatgattgacatggctcatcctgccggactgattgcagccggtgaactggataaccccgtgaaatatgcccacatcgtgacctccactacccacaagactctgcgtggtcctcgcggtggcgttatcatgatgggtaaggacttccccaacccctggggcaagaaaactccgaagggagaaatcaagatgatgtcccagttgctggattcagccgtattccccggtatccaaggtggtccgctagaacatgtcatcgcagccaaagccgttgccttcggcgaaatcctgcaaccggaatggaaagaatatgccaagcaggtgaagaaaaacgccgctgtcctggcacaagccttgatagaccgtggcttcaccatcgtttccggcggtacggacaaccactccatgctggtagacctgcgcagcaaatatcccgatttgaccggtaaggttgccgagaaggcgttggtatctgccgacatcaccgtaaacaagaacatggttccgtttgacagccgctcggctttccagacttccggtatccgtctgggtactcctgccatcacaacccgtggtgccaaggaagacctgatgctcgaaattgccgagatgattgaaaccgttctgtccaacgtagacaacgaacaagtcatcgcagaggtacgtgcacgcgtcaatgcgaagatgaaagaatacccgctgtttgcttattaataagcaaacagaattaaaaattaagaattaaaaattaaaggctgcgcaatgttcgctttgaactgcgcagcctttaatttttaattctaaacgcgctccgcgcgtttagctcagcccttctatatttccgtccacaatatcaatgtgttcggcttgtggtttcttgggtaatcccggcatacggagaatttcaccggcgatggctacaatcatttccgcaccgttattgaccacaatatccttgatgtggaactcaaagttgttgactgcaccgtatatcttcgggtcggcagagaaggagtactgcgtcttggcgatacagacggggtaatggctgatacccatctgctctatcagtttgataaccttgcgggagtggagactgtaagtcactacgcttgccccgtagaggttgcaggctaccttttctattttacgttccacgcaatcgctctcttcgtaggtgaaggtcagcggttcggatggtttgttctcgatagtatctactaccagattggcaaggtcaacggctccctctcctcctttggcaaaggcgttgttcacggcaaaacctacctcaagcttttcttcgcaatggcggcggatagcttccacctcctcgtccgtatcactggcaaaacggttgaatgccacgatgacctgctggccgaatgaacgcaaattgcgtacatgtttgtccagattgccgaagccctctttcagtccttccatattgggttccttgatgcggtccagactgacaccgccatgcatcttcagtccttgtgcggtagcaacgattatcgtcagcttgggctgtaggccgctcttgcggcacttgatgttgtagaacttctccgcacccaggtcagctccgaaaccggcttccgtcactacataatcgccgaatgtcatggccatttttgtggcaagaatggagttgcaaccatgggcaatatttgcgaacggtcctccatgaacaaaagcagcagagccttcggtagtctgtaccaagttggggttgatagcatctttcaacagtacggtaatggcaccggctactcctaactccttcactgtgaaaggagtaccatcgaaacggaatcccagaataatattttcaatacggcgacggaggtcgtcgaggtctgttgccagacagagaatagccataatttcggaagccggggtaatatcgaagcccgactcctcagtaatgccgttggtgctcggtcccaatccggtgacaatgctccgcaaggaacggtcattcacatcaagtacgcgccgccagatgatttctttcagtccgaagccgtctgcctgatgctggtacaagtaattgtcgagcaaagcggaaatcatgttgtgtgcggaggtaatggcgtgaaagtcgcccgtaaagtgcaggtttatcttctccatgggaagcacctgggcatatcctccaccggcagcaccgcctttcatgccgaagcaaggacccagcgagggttcgcgtaaagccacaatcgctttcttgccaatcttgttcagccccaatgccagcccgatggacacggttgttttaccgatacccgctttcgtagccgtgatagccgtcaccagtatcagattgctcttcttcactttctcttcatcaatcagatgcgtaggaatcttggctatgtaacggccatagttctctacttcgtcacgcgggatatccacactttcagccacctgctttatcttcttcagctctatgctgcgggctatttcaatgtccgatttcatacagagtcttttctttaaataacaactttaatgttttgaaagttgcaaaagtacgaaagatgtggcaaagtacaaaagaataccgtattttcacctgaccacctgcatcttctatctatttgaaccgcgacgtatccactgcctcccgttgcttctccttatatccaccgaatttataggtgaacgatacgccgaattcgcggaagcatgagtaatgattcgtcacattctgcgtcttgaaacggatgcggggagaaatctgtcccgtctcaaaaatatcgttgcaatagaggttgagaatggctttgttcttggcgaagccgtagcgcagggcaatattcacattgcccgacgtaggcaggtcgtagatgccctgaatggctttactatgcacaaatccggtcaccgtcagcttcaagtcgggtttggtggagagagtaaaagtattgttcatctgggcaatgccatagcattgctttctatcgaaaggaatatcccagaaatcaccatccttttcgcgatgccacaagccgatgagggtaagacgagaattcaaccaattcttcaccttaaacggtatagaggcttgtatacctgcttgttgctgataatcaaaattgagtgtcttgtagatttcaaccagacgttcggaagattggtagagcgtctgtacggagtagtccttggtatggttgaaccaagcgctgaagatgtatttgctcttcaaaatataggtcattttaagctcatactcttgcgccggtttcagcaacggattaccatgcagctcagagtatccgccaccgatgtaagagacggcatcctgcaccgcccagtagtcgggatagtccttgtcgctgctcagagagagctgaaggatatgtcccggtgacggcatatagttcaagttgacgatgggataccagtcccactggttccagacgggagtcttgtaatgctccacagccagggaagcgtccaaagcgagtttgtcgccgaaactcttgctgaaacctgcatagatattccaggtctgttcgcggcggcgggacttcatattgcttaaggcatctgaggaggtcagttgttcgccggtttcggggtcgtaataatattggtagctgttgtcgatgctggtagtatagatggctccgtaattcaaatcccaaccttttcccagactgtgctcctgggccagaaagaatttccatcggttgatgcgttggcaatcttcggtgtagaagtcaagttcctcatcctgcatgcggctatgcagcaactggtcggacggggaacggtagtaggtcagttcggcaccggctttgaggccgaaaggggtacgatagtccagacggccgttgtgcagccagtcggtgctattgccatgagttgtggacacctgcgtgcccgtcacgcccgtccagttgtgggaggtggaatagccaccgttatagacgaaactcagctgatggtccttggcgatgttatagtccgcccctaccctgaaattatgggtatggctgcggccacggcccacctcatatgttgtcatgggatgaaccgagccgtctgccagggtgtgcacagcctctttgtcggtagtagagtagccccggccatggctgtgcgagtaaagaaaatctgctgagaatttatttttgctgaagagcaggctggcgcgttcctcaaagccttcgttatgcttctggcgatacttggcatagagttcgccttgccaggagtctgggccgcctgccgattgtttcaaggtgatattgatcagtgcgccacgcacctggtagcgtgcaggggcgttgtacatcacttccgccttctctatgcggctggcagggatgctgcgcagcaaggaatagagctgctcggtgctgagggtggttactttgccgtccaggataacggtgactccctggcctgccaactgcagcccgccattcatctcgatgacgccgggaagctctttcacggcatcgtaggcattgtctacggggaggttccggataaggcggggcaggtcgtacaccagcttgccttgcgctgcctttacgatggggcgttcgccggtaatcatcacttccggcaaggtctgataaagactgtccagacgggcatcggtcgtgataaggctgtcggcgctgaggatgcggttgtcgtctgcaccggaggtggttgcagtgccgttgttctcttgtgccgaaagactgatgctcaaagcacagcatacaatagggagtaaatagaatcgtttcatgttcttctttttatttatgtttatattcttcttctgcaaatcttcgtctgcaaagtacggcagaatcagcagaaacttgtgttatcagcggcttaccaagtgttatccagtgttatcgggagtgttatttagtcttatcggatgatagggttcacaatattaatcttacctttgtatgtataaaagtaaccggaaacaaacatgaaactgccattcaaatatattgccatacttgtcatcgtctccctggccggcatcttcgcctaccaagcctactggctgacggggctctaccataccatgcacagtgaaatggaaagggacatcaccgaagccatgcgcatgagcgactataacgaaatgatgatacgcgtggataaaatgaagcaggacgacataaaccacggtgaagtcagcgtatcagccggatacagcgatgacggaaaatcatttgtccgtagcagtaccaccatctcccgtgaagattctttggacaacgctaccctgcacgaaaccttcatgcccaaaggagacagtgtttacgtgacccacccgaacgattcaacccgcgtggaagtcagtgtcaaggactcggacagctctccccaatccgcattgagtgccaaagggggactggatgtgattttgcgcgaccaaaacagtatgctggaactcgccacctacttccagcgcggactgcattcgggactggacatcatttccgaccccgacgtagtgctttatgacagcctgctgacttcattcctgcatgaccgtaacatcaatcttccccataggctgctacatcttcacaaaggcagcaaatgggactctaccattctctatatagatacaccttaattccgcaacactattacaaatataactttttaagtacctgagcaacaaaaagttgctcaggaatttgccatgtcagatttttcacctatcttagtgttgcaaatcaaaatatgtatcaaacccgacagacatggcaaaggtagcaattaaatccgagaaactcactccttttggaggaatattttcaataatggagcaatttgactccagactctcatctgtaatcgactcaaccctcggtatgagatgcaggctgtatggttatcaatacagcgaaatcatccgttcgcttatgagcgtttatttttgtggcggctcatgcatcgaggatgtcaccactcatctgatgtaccacctttcgcttcatccgacacttcgcacatgcagtgccgacacgattcttagagccataaaggaactgacccaggataacatttcctacacatccgacactggcaagacctacgacttcaacacggcagacaagctgaatacactgctcctcaattgcctattgtccacagggcagctgaaagagggcgaggggtatgacgttgacttcgaccaccagttcatagaggctgagaagtttgatgcgaagcctacatacaagaagttccttggttatcgccctggcgtggcggttattggcaacttgattgtcggcattgagaacagcgacggcaacacaaatgtccgtttccaccagaaggacacgctgaagaggttctttgaaaggtttgaacaaaacaagcttattatcaaccgtttcagagctgattgcggctcgtgttctgaagagatagtggaagagattgctaaacactgcaagaccttctatatccgtgctaaccgatgcagttcgctctacaatgacatctttgccctcagaggttggaagaaagtggaattgggcggcattgagtttgagctggcctccattctcatcgagaaatggaaagggaaggcataccgtcttgtgattcaaagacagaagcggatagacggcgaactcgacctgtgggaaggagaatacacctaccgctgcatccttacaaatgactacgagtcttccgagaaagagattgtcgaattctataacctccgtggagggaaggaacgcatcttcgatgatatgaataacggattcggctggaacaggcttccaaaatcctttatgggagaaaacacggtgtttcttctgcttatggcactcatacgcaacttctataaattcatcatggcgaggcttgacgtgaagaggttcggactcaaagcaacaagccgcatcaagacgtttgtctttaagttcatctctgtgccagccaaatgggtcaggacatcaaggaagtatgtgctgaatatctattcatgcaacaatgcttatgccaatgtgttccagaatgactttggataacaccgacaacttatagtcgtgattttgcgtattgcctcaagtcgcatggtggggtaaggggcatttatatgtctttatggtgacattcgatgcactgtgccccctttttactaacgatgcagattcttttcgcttctgtatcatattaggcgcgtagttgcggatttgaggatacattggtaaacatcggtacccccggctatgtgcctacctcaaaagccgtggaatataattattctttcgacatcaatacaaatcaaagctaccgtctcatcatggaaccggccggcatgttggtcttgcgacagatgtcgggcattctcaccacatcattcgttattctgatcgtactcgctttctccttctggttcctgatacgcaccatcttgaaacagaagacactggaagagatgaagagcgatttcaccaacaacatcacccacgaactgaaaacccccatcgccgtagcatatgccgccaacgacgctctgctcaacttcaaccaagcggaggaaaaggccaaacgcgacaaatacctgcgtatctgccaggaacagcttcagcgcctcagtggactggttgaacagatactttccatgagtatggaacgccgcaggactttccgcctgcacccggaggagtttgcaatacgtgatattctggaaacgctcatcgaacaacacaagctgaaagcggaaagctccgtccacatatcggtggacatcgaaccggaagatttgagcgtacttgccgaccgtacgcatttcagcaacatcatcagcaacctgatagacaacgccatcaaatattcgcacggagaagccgaagtggccatccattgccgcaaggtaaccgtcgaagggcagaatgaacagaccgaaatctccgtcagcgaccacggtatcggtattgctcccgagaagcagaagcacatcttcgacaaattctaccgcgtacccacgggtaatctgcacgatgtgaaaggctatgggctgggattgttctatgtgaagaccatgatagagaagcatggtggcagcgtatcggtaaagagtgagttgggaaaaggaagtacctttacgataaggatatgataacattatttgttagggtactttacattacttgttaaggagctttacattacttgtaacaaaagcgacaattatggaaaagataactgtacttctggttgaggacgaacagaccctcgccatgattatcaaggacacattggaaggacagaacttcatcatccacaccgcagcagacggtgaagagggattgcgcaagttcttcgacctccgtcccgacgtgctggtggcagacgtgatgatgccccgcatggacggctttgaaatggtgcgccgcatccggcagaccgacaaacagaccccggtactgttccttaccgcccgctccaccatcaacgatgtggtggaagggtttgagctgggtgccaacgactacctgaaaaagcctttcggaatgcaggaactcattatccgcataaaggccctggtaggcaaagctttctcctttacagaggaaaagcccaaagaaactaccgtttttgaaatcggtgactaccgtttcaattccgtcactcaacgacttgcttttgcaggcagcaccccgacttcacctaacgcggatacggaagtggaactctcccaccgcgagtccgagatactgaaacgtctttgcgagaaccgtaaccaggtggtcaacacccagaatgtattgctcgacctctggggagacgacagcttcttcaactcccgcagcctgcatgtgttcatcaccaaactgcggcataaactggccggagacgagcgcatccgtatcgtcaatgtgcggggaataggatataaactaatagtgaactaaactaaaactaaactactatttatgagaaagttattattcattacttttatctgttcctcactctgcgcctatgcacagagcgagattccggaagacacaataaagaaccggcctcccgtaaagaaagagcagattcccttttctccaaaagagaacaagcgtacgggccttgatgaaagccagccccaacaaagcctgcagggcgaacagcaggaagagataaatctccatctccctccctccgactatgtggagcccctgccctggacggacatgaaaaagatacacttccagaagaacatctttgaatgggacttccagcgcttcgccgatttcctgctctcgccggaagtcgtactgacgatgtacggcagccataacacctatcctgcaatgggctccatcatgcaggctggcgcaggagtcacttattacagtcccgacggacattgggaattgagcggaggggtatatgccgcccactattccatttctaccccctcctccattgccggcgcccgatatgccaaaagggatgcccctcggggtacccaatgggacgtaggttacaatgcctccgtatcctaccgcatcaatccctacatgcgcctgcatgccttcggccagtattcgggctacgggagaagcaactcctttcatggatatatgaacccgatgtatccgcaaagcggttatggcatggtactggaactgaaagtgacggactggctcgacctcaacggaggcctggaacggagctacgaccccaccaaaatgaaatgggtgacttcgcccgtcttcgcccctaccattcgtataaagaaatagaaataatacaaagatatttccggaaatagagggaaacgagtatctttgttcagtctgcccctatgcggtggacagcaactgaaattgtgaacaaagaactatgaaacgaatcttcttctgcatcatcattttacttgcaggcatgtcatccgtcagcgcacagagcgagatgcctgccgatacggtacgtactgcagtacatggcgaagcgtctcccgaaggcatgtctccgtctgaaaaggagcttctgccggacgtgaagaattacgacggcttcctgctggatatggggctgatgaatctgtctgcccccactcttcccaaattcaccttggagataccggatgccagcaaggactatagccgcatcttccagttgaacccgaacgtgacttattcacaaggcctttcgaacatattctcactcagcaactcccggtatttcagttcaaaccccttcggactgacgggcttctggggctctactgacaacctgcaaatgggaagtttcactttgaagaacggcatgcgcatccatacgtacggcgaatatgacaaggacggctggaaagtgcccaacccttccgcactgccttgggaaaagaacaatttcaaaggggcgttcgagctgaaatcagccaacggatcctttggcatacgcatcgaggtacagcagggcagacacgtgccctattgatgcccatcacttaacaacagaatcaatgacaagaaagaaaatactggtgataggcgccaacggttttaccggcagacgcatcctggatgatttgtcccacaacgtgttttatcagacaacgggctgttccctgcacgacgacatctgtccccattcgggcgactatcgctttatccgtacggatatatgcaaccgccaggcggtggaaaaacttttccaggaagtacagccggatgttgtaatcaatacctccgccctctccgtccccgattattgcgaaacgcaccatgcagaagcggatgccgtcaacattactgccgtggagcatctggcagaatgctgtgaggcgggaggcagccgttttatccatctttccaccgacttcgttttcggtggtgatacggaccgaccctatacggaggaggatattcccgctcccgttaattattacggctacaccaaactggaaggtgagaaacgtatcgctgccgtttgcagggattatgccatcgtgcgcgtagtggtggtgtacggtgccgccctgcccggacagcatggaaatgtgctccaactggtggcaaacagattaaggaacaatgaggaagtgttcgtcgtatccgaccaatggcgtacgcccaccttcgtgggagacgtgtcgcaaggagtggagaagctgataaatcacccacaaaacggcatctaccacctctgtggcagcgagtgcctgaccattgcagacatcgcttatcgggtagcggacgtattggggctgaatcgctcgctcatccgtcccgtcaccacgaaggagatgaacgaaaagacaccacgtccccgtttcagcgggctgagtatagaaaaggcacaccgggaactggggtatcagccgcgcacgctggaggaaggaataaagcagatgttcggatggtaaatgatgcagtcggatggtaaatgatgcaggttgaggatggcagcagattcgactacagcaactccggctctgccagtcctttctctttgcgatacacacgtaccatctccagaatcacatctccatatttctccacccctttctttccgaaatacggaatgcgtacaagcatggccttatccgaaggaagcagattgctgatacccagaattgccttctgctgaatgacggtatatacgggcaatcctaatgcggaagcttctgcattgcgccatgccaccaagcggttgtaaagttccggatgcaacacatccgtgggtacttcaacagccgcagcatcgcgtttccgctcacgcggacgtttctctttatcagcctgcttactgcttccctgcccttctttggcagcagcacttctccctttgcctttacccttctgcgaagccgaatcgtcaatggaaagcagtgctttctgcttcaagtatcctgccacatggaaaccattctccagcacataatccagcaaatcagtcttcatgtcaaacacttcctccagctcctccatggcatcccggagcttcttcttcaactctttattatcagaagttaccgtactcgccatcaccgcatccagcggttgcaactgctcttgaaaataagtggcggcagagtgtatgcgcccctgcaaagtcgggtcggctgcatagtcctgcgcagtatcaatcaggcgggtatactggatactgaacttctgggctactttcgtcactttgtcgtgaaaacgttccatttcctccttacaggctgcgagttgcttgggaaagagcttgtacaagtgttcgtctatcagccgcacataccgccgcaaagcctgctccatgggctggaaatcgaacaagcccgacagcagttccaggaaataggtctgctgcaaggaacggaagcgtttctcgtccggctcgtttctccgtgcctccatcgtgaaggtatctactgcatggtcactgataacggcctttgcagaaagcggggcactgagcaccactccctccaatgtcttgcagcggctcagagccacataggtctgcccatgcgcaaaggaggcactggcatcaatcacggcacgttcaaacgtcagtccctggcttttgtgaatggtaatcgcccacgccagcttcaacggatactgccggaatgttccttcaatatcttctgtaatctccttggtttcctcatcaagcacgtatttggcattcgtccactcttcctcttgaagtaagaaggtagcgtcgcttcccttactgcgcacttcaattccatctgccgacacggctgtcacctctccaatcatgccattgtagtaacggtgctcaccggaggtgtcgttcttcacaaacattacctgggcaccgcgtttcagttccagtacttcatccgtgggataggaatattcgggaaactttccgtcaatcttggcacgaaaggcatacgagcgtcccggaagttgttccagctcatggtcattaatccgttgggcctgataattgtgggtcaccaggcggatgtatccttcttctttatctggtacgaaattgggaatataccggcggttcaaggcttccagcacttgcccgtcacaacggttttcgcgaatgcggttcagtaattcaagaaaagtcccatcgttctgccgatagactttctttagttctatggtgcaatattccgtctgcttcaaggcctggctggagaagaaataaggcgtgtcatagtatttacgcagcatctgccactcatcgtctttcactacgggagcaagctgctgaaggtcgccaatcatcagcagttgcacgccgccaaagggtttgttccggtcgcggaaccgcctcaagacggcatccaccgaatcgagcaagtcggcacggaccatactgatttcatcgatgaccaataaatctatactgcgtataatgttgattttctctttcccgtaacggaaacggtaagatgctttgccatccgcgctgaatgagctttcgggcacataaggagcgaaaggtacttggaaaaaggagtggatggtgacaccgcctgcattgatagcggcaattcccgtcggtgcaagtacaatcatccgtttcggactctctgccctcagttttcgcaggaaagttgtcttaccggtacctgccttgccggtcaaaaaaagatgagtgcctgtgttttcaatgaattgccatgcaagcgctatttcgggattattctccattgatatgtttattattcaaccaatccgctctctctcagaatgatacggatttcatcagtagccatatatgataataggacaaagatagcggttatttcgttatccttgtcctattattccatttatttgtacccatcctgagaaagccctttacggggcaatccggactatttcaagctaccgccgataatatcgagcagctcattcgtaatggcctgctgacggctcttgttatactgtttcgtcaaatcttgaatcaactcgttggcattatctgtcgccgtctgcatggctagcatacgggcagcatgttccgaagtattggaatcgagaagcacggtaaatatcttctgactcaacacttttggcagaagttccgctatcagttcgccgacggaaggttccacaatgtaatcattattaaaactgcgggcatcctccggtacatcttctgccgcctcctgcgctacttgcgtcaggtcaatgggcagataattctcgcggagcagcacctgcgaacccatcgatttgaagtgatggtaaatcagctccacatggtcaatctgcttttccacaaactcatgcatcaacttctctgccagctcatacgcttcaacgtacgaaggcttgtctgccatcacctggtagctgccttgcggcacatatcccattttcttgacggcttcctccacctttctcccaacgggatatatcagaatattctccttgcccagcgactggtaatcttccaaagtccgttccagcatcttcgccacattcgagttgaatgcaccgcacaaggaactattggacgaaaacgccacgaccgctaccctcttcacgggtcttttctcggtatagggcgactcgaaggaagcatccgtacgcagaaagttcgtcagaatctcactcagcttccgttgataaggcagcatattctcaatccgcccctgcgccttatgcagtttggcagatgccaccatcttcatagccgatgttatctggcgtgtactcttgacggagcttattctattttttacctctttcagtgaagacatatatctatttacgatttaattatttacgatttacgattgaggtaacttctgcctgcgtccgatttacaacttaccatatagagtaactccaatcgtaaatcgtaaatcgtccaatcgtaaatcacatgaattgccttgcaaccgcctctgccgtctcctcaatcttcttgcagacatcgtcattgatggcacccgtctttaaaacgtcgagtacctccatgcgatagttcatctcaagagactcaaggaagttgcgttcaaactcgctgaccttgtccaaaggaacattcctcaacaagccgtgcgtgccgcaataaagaatggcaatctgcttttctaccggcatcgggctgtattggggctgtaccagcaggcgtgtattcttctgtcccttgtcgatggtcaatgccgtcacggggtccatatcgccactgaacttggtaaacgcttccagctcccggtactgtgcctggtcaatctttaatgtacctgccaccttcttcatagccttgacttgggcattaccacccacacggctcacagagatacccacgtcaatggccggacggttaccctggttgaagaggttcgtatcaaggaatatctgcccgtcagtgattgaaatcacattcgttgggatataggcagacacgtctcctgcctgagtttcgataatgggcaatgcagtcagcgaaccgccacctttcaccttgcctttcagactgtccggcaggtcgttcatctcgcgtgccacttcctcctggctgataatcttcgccgcacgttccaacaaacgggagtgcagatagaagatatcacccggataggcctcacgtcctgacggacggcgcagaatcagagacacttcacgataggccaccgcctgcttggacaagtcgtcatagaccaccagcgcatgacggccggtatcacggaaatactctccgatggcagcccctgcaaagggagcgtaatactgcaatgcagccgggtctcccgccgtagcagccaccacaatggtatagtccatcgcaccgtactggtgcagggtattcacaatagaagctacggtagaacctttctggccaatggctacataaatgcaatataccggatcaccagcatcaaaattggcacgctggttgatgatggtatcgatggcaatggccgtcttaccggtctggcggtcaccgataatcagctcacgctgtccacggccgataggtatcatggcatccacagccttcagaccggtctgtagcggctgattcaccggctgacggaagataactcccggcgccttgcgttccagcggcatttcataaagttctccgcctatcagtcctttgccatcgagcggcgcacccagagggtctattacacggcccagcataccctctcccaccatgatggaagcaatacgcttggtacgctttacaatgaagccttccttgattttatccgtagggccaagcaacacagcacccacattatcctcttcgaggttcatcacaatggccttgatgccgttgtcgaactccaacaactcgttggcttcggcattgcgcaacccatagatacgggctacaccgtcactgacttgcagtaccgtgccaatctcgtccaactgtacgcgggtgtcaatcccttccagttgcttgcggagaatatcggagacttcgcttacttttatattttcagacaacatcttagtatttactattttacaatttactatttactatttgaaagaacccgaatcatatactgtttgacctctacaacttacgcatcacaagactattaaataagtaaattgtaaattgtcaaatcgtaaatcacacgattcttctattcttatcaatgaactgctgtttcactttcttaagctgcgtagcaatactggcatccagacggaagtcgttgatgtcgaagataaaaccaccttcaatggagggatccacttcagtctgcagctccatgctggcatgcagcagggaggaagcactgtcatgaatacgctcccgcacttcctggctgacgggaacggctgttatcagctttcctacaccgatatgcttgtctttccggtacaaatccagaaaactcaggcagatgtactggagaaagttttcccgccggttcttcaacaccagggtcatgaaacgcgcaaactcacggcccgcaggagcatcccccacagcagcggtacagataagtgttaacttctcacgtatcgtcaggatggggttttccaatgccatgcgcaaatcgggatgtttcctgaagctacggtcgagcatacaaaactccttgtacagagtatcttctgcccccatgctcttggcatattccatcaatgctttcgcataacgcatcgaaacgattcctatatccatttctttgagaattaattgtttttacttgcggccagcacttcatccagcatccggtctatcatctccatctgctcatgtttctcgtccagattcttgcggataattttctcggctatatctacggacaagactgccacctggcggcgaatatcgcggatggcctcttccttctcttgctgtatctgctttttaacttcgtccagctccttctgcgcggcggcttccgcctgcttgcgtgcttcgacgataatcttgtcacgctcatgcatcgcctcccgcagaatacgtccttgttctttgttggcagcagcaatcaacgcttcactctcctctttcagtttggagagctgggcatttgcttcgcgtgccacttccaaagactggtcgatgtaggtcttgcgaccttccaccatcttggtgataacgggaaaaccgtacttggcaagcaccacaaacaccacaccgaatgaaaggagcatccagaacagcagaccactatcgggtaataacaatgacataattttatttactatttgacaatttacgatttacaatttggctgcgcggtgatgctgcacggacaaattgtaaatggtaaatggtagattgtacattataaaaagaataccaataaacacacaactactgccaacaaagcaacaccttcaatcaaggcagcggcaataatcatgttcatacggatatctccggatgcttccggctggcgggcaatggcctccatagcagaaccgccgattttaccaatacctacaccagcaccaataacagccaaaccagcaccaatggctgcacccagtttactaactcccacacctgccgcagcagcttgcaataatacagatagtaacataactttcagtttttaaatggttatttttattaatatttatattcccaataatcgtatcacttcaccgccttctccttatgctcttcctgcgccagaccgatgaacacggctgacagcatggtgaacacatatgcctggataaaggcaaccaacaactcaagtgcattcataaagatattgaacaacaccgatgccacggtcagcgttccgttcaaagcaggtcccatactggccgagatgaatatcaggcaggtaagcaccagcattgccatgtgccctgccagcatattggcaaaaagacgtatcatcaaagcaaacggtttggtgaaaataccgaagaactcgataaacggcatcatggggaccggtaccttcagccaccagggcacatccggccaaaagatatctttccaataagtcttggttccaaagatattcacggccaagaaagtacagatggccaataccatcgtaatggctatatttcccgtcacgttggcccctccgggaaagaaaggaatcagccccataatgttgttgatgaaaataaagaagaaggccgtcagcaagtaaggtgcgaatttacggtacttcggaccgacacagctctttataatatcatcgttcaccatcatgataaacatctccataaacccgatgaaaccaccgggagcggcacttccctgcgggtgcttgcgataccagtgcgccacactcaaaatgatgagaagcagcaatgcgctgttgatgagcaaagccagtgtcaccttcgtgatggagatgtccaacgggcgtatttcgtttccggtggcatcatactccaccagcttgccttcgtacttgcttcctgcgggagcgatggaaaagccttcataacttccaccgttctcctccagacgtgaggatagaaaggcatgccatccggtggtagagctatgcactattaccggcaaaggaatcgtaacgtgagtttcgccccacgtcgtgatgtgccattcgtaagaatcgccgatatgcccgaagacaatctccttcacgtccaccgtattctcggcccgcaccgtggcgggtagcaacatgcccagtgccagcagaactacagtcagtatgttacgcaatcttttcattgttacttttctttttcagtttccgattcgcctcaaaagtgaagaagaaccaggaatcataaatcaaatatatcagatagttggctataaacgtcaacaaaaacgccctggcttcctcacgtactgcaacgcaataaaccagcatcacaatcatggagaccagcattctcatcacacgcatcagcagataaatctgcaacattcgtcctggcatccggtgacggcagctttcggtcatattaatcatgaatactccgaaaacaaagaagaaaagcggaatcagcggataaccgccgaaatagtgatgcggatttatcgaaaaatacgcccaaccgcctacaattcctatcaataccgtcaagagcgctgtatgcaataagtagtttctcttagtaatagtcacgccaacaacctctattttttaatttttaattttttaatagcctattgctgttctatacagacggcaacccttccgttactcatctccacgaatccgctttgaatatccaactcatgttcctcaccgtccgttgcgtaaatcaatttccccgttcccaacgatgatacaatcggtgcatgctgcggcaggatagaaaaagagcccatagtgcccggcaatgtaacactttccacttccccgttgaagagttccttctccggtgaaacaatattcaaatgcaactttttcatcatcaaagctcccagacttttaatttttaatcgtttttccccctgcctgctccagtagtttcttacccttctcaatggcttcttcaatggttcccacattcaagaaagcaggttcgggcaggtagtccacctctccgtcaagaatcatcttgaagcctttgatagtgtcctcaatggaaaccattgtacctgggacacccgtaaactgctcggcaacggcaaacggctgtgaaaggaaacgctgcacacgacgtgcacggttcaccaacgtacggtcggcatcagagagttcctccataccaaggatggagataatgtcttgcaattccttgttgcgctgcaatatttgttttacacgttgtgccacttcgtagtgttctacccccacgatgtgtgggtcgagaatgcgtgaagtagattccaacgggtccacagcaggataaataccaagttcagtaatcttacgactcaacaccgtggtggcatcgaggtgggtaaacgttgtggcaggtgccgggtccgtcaagtcatcggcaggcacatatacagcctgcacggaagtgatggagccgtttcttgtagaggtaatacgctcctgcatggcacccatttccgttgccagtgtcggctgatagcctacggcagaaggcatacggcccagcaaggccgaaacctcggaaccggcttgggtgaaacggaagatattatcaatgaagaacagaatgtcacgcggaccgtccgtctccgctcccatgtcacggaaggactcggccaccgtcaacccagacaatgccacggactgacgcgcaccgggaggttcgttcatctgaccgaatatcaaagacacttgtgatttggccacttcgtcataatctactttggacaaatcccaatggccttcctccatacctttcttgaattcttctccgtaacggataacgccggattctatcatttctctcagcaggtcgttgccttcacgtgtacgttctcctacaccggcaaacacagagaagccgtgctgcttcttcgcaatattattaatgagctcttggataagcaccgtcttgcctacaccggcgccaccaaacagaccgattttaccgcccttgctatatggttccagcaagtcgataaccttgatgcctgtataaagcacctcttgtacggtagtcaaatcttcaaacttaggggggtcgcgatggatgggataagcacctgtacggtccaactccttcatgccgtcgatagagtcgcccactacgttcatcaggcggcctttgatttgtgtacctatcggcatggtgatggggcctcccagcggatgcactgtcattcctctctgcaggccgtccgtactgtccatagcaacagtacgcaccgtgttttcaccaatgtgctgctgtacctctacaatcagtcttttgccgttcgacctttttatttccagtgcgtcgtgaatactcggcaacatcatttctgcctccgttccttcgaaatagacgtctactacaggcccgattacctgtgagatatgtccgacaatctgtgacataagcaatctttttattctatatttccttaattatttttcccaatactaagttgtaagtcgcgtgtatcctcattaacaagtcagccaagtcgcgtctttcatcagctatgtactcgtacctattaacgtttgtcagctatggtttgttcatcccaatagttacataaacaacaacgcaaatgtataaacaatttgcatgtagttgttaccgtgtatagcattttttgaacaaaaaagactattttgaacgattaatactacaattggaacaaattgttacagacatgataacatcagttaacaattagcaagaaaaaggaattgcccacccatcttatgaaaaaacactgaattgacaacagaggttctgtatataatatacaaaaaataagccttgtctctcgacaaggcttattcacaacacaaacacaaaataaaacacgacaaaactactatgcaatcttacctgtctatgccggggaggcatacgtactagttacggatattcacatatacataaacagcttcaggctgatttgcacattataaacaaatgcggggaggcatttgtttattgcctatttgttaaaaaacacaaattcaaagtttgtcattgaatacctctttcacgaagcttcaactgccatttccatgcagaaagtaaagtatcttcaatacttgtttctgccttccaacccagttcattgtttgccaattccgggtttgcccataccttctcaatatcaccggcacgccgccctactatctgatagttcagttttacaccggtagccttttcgaaagcattaatcagttccaatacggaaagtccacgacctgtaccgatattgaatacttccactttttccttctgcttgttctccaagatacggcggatagccactacgtgtgctttggccaaatcgactacattgatgaagtcgcggatacaagaaccgtcgggagtatcataatcgtcaccaaacacgctcagtttctcacggatgccgatagcggtctgggtaagataaggaatcaagttctgcggtacaccgttaggcaactctcccaacaatgctgtggggtgtgcacctatcgggttgaagtaacgcaacaagatggcgtttatcggagcaccggaagcaaccgtatcacgtacaatctcttcattgatttgcttcgtgtttccatacggagactcagctttcttaataggtgccttttccgttaccggaagttcgtccggctggccgtaaactgtgcaggaagaagagaatacgataccttccactccatgcttcggcatcaattccagcaggtttatcagtgaaaccaggttattacgatagtaaagcaatggtttctggacagattcacccacagccttgctggccgcaaagtgaatgatggctttaatgcctttatatttggtaaacacagcgtcaagaccggcataatccaagcaatccaattcctcgaatgcagggcggatgcccgataccttctctatgttatctacaacatctgcgctggagtttgacaaattatcaataataacaacttcataacctgcgttttgaagttccaccaccgtgtgagaaccaatgtaaccggttccacccgtaactaaaattttctccttcatattaaatatagacaatttagcttttaggttatcaatacgccacaaatgtaaggaaataaattaataaaaacagaaaaaggggggataaattttagtttatcccccttccactttatttccggtttttcttctttaaatcttcacaacccccgaaaagcccatgaatgccattgccagcagtccggcagtaatcaaagctatcggagtaccctgcatacctttcggtacactaaccaggctcatttgctcgcgcaggcctgcaaacagtgtcagtgccaagccgaaaccaagtgccgtggagaatgcataaaccactcccgtcagcaaatcataatctttttggataacaaggatagccacaccgagaatacagcagttggtagtaatcaacggcaggaacacgcccaaggcctgatacagagaaggagaaactttcttcaggataatctctaccatctgcaccaatgcggcaatcaccaggataaaggtaatagtctgcaaatagcccaaatcaaaagcgtcgagcacatacttctgaataaggaatgtcacgatagtggcgatggtgagcacgaatgccaccgctgccgacatgcccaatgcagtctccactttcttggaaactcccaagaacgggcaaattcccaagaattgcgacaatacgatgttgtttacaaagattgccgagataaatatcaatatatattccataatcattaaattaagaattaaaaactaaaaattaaaagcccggcagcctaccgccgatacgttctcaattttttcatttttaatttttcattattaattcttcttcatactgttgattaaagcaatgagatagcccaatgcgatgaatgcacccggagcaaggacaaataccaacatgccgtattcttcaggaaggatactcaagttgaatatcttgccggttcccaggaactcacgcacggcacccagtaatgtcagtgcaatggtaaagcccaagcccatgcccagaccgtcgaacaaggaagccaccggattgtttttggcagcaaatgcctcggcacgtcccaatacgatacagtttacaacaatcagcggaatgaacaggcccagtgtggcgtacaatgcaggaacgtaagcttgcattatcatctgcaacagtgtcacaaatgatgctatgactacaatgaatgaagggatacgcaccatatcgggaatcagattcttgatggcagaaatcaccacattggaacatatcagcacgaacattgtagccagtcccatacccataccgttaatggcagaggaagtggtacccagtgtaggacacatacccagcaggagcacaaacgtaggattctctttgataatcccgttcatcataactttaaaattattcatatcttctactcctttcttatttagcgctgagtgtatccacagctgcgggagctgcggaatcagcaggttgttcaacattcttttgagtagcgccggtagtgccgtcggcagtttcctgaccggcataggcagcataagccgcattcactgcattcaaaaaagcacgtgaggtgatggtagacgctgtaatggcatctactttaccaccgtccttgctcactgtcaatgcagcttcacccggattcatgccggtgatgtcacctttattgcctttcttgaaccagtcggcagccttggaacccaaccccggagtttccacatgcgacaacaaggagtagtcgatgattttgccttcagcatcgaaaccgaccaacactttcagctcaccgccaaaacccatggcaacagcttccacagcagctccgatatattctccgcctttggtggcaggatatacagaatactgtactccgtttacttcctgcatcttcttctcggcgatggggtcattgtcgaagcccggaaccaccgcacttacggcatcgctcaaggtctttgcattggcctgcgcaatgggctccttcgtcaattcgtttacataagccagcaacgctacggagattgcggtaacgcccgtaagtaccagcaacatattcttcaaggatgattctaactttttcatttcttcttcgctacctccccaaagcgtttaggtttaacataggtgttgatgagcggagtgaacgcattcataatcagaatggcaaacgacataccctccggatatgcaccgaacagacggatgatgacagtcagtaggccgatgcaaacaccataaatcagcatacctttgtggctcatcggagaagtcacgtagtccgtagccataaagacagtacccagcatcagaccaccggacaacaactgtacgaccggggatacataaagttccggattgaccagatacatgataccggagaacacgaataccgtcaccagaatagataccggaatgtgccaggtgatgattttcttccacaacatgtagaacaaaccaagcagcagcgccaaagcactcacctcaccgagacatcctccattattacctatcagaaggtcgaaagctcccggaaggtcgctcagggacatgcccggagcaccattgatgacacctttcataatagccagcggcgtagcagccgtcgtggcatccgtataggctgtcaactggcctacagccggccatgtcgtcatctgcacggggaatgaaagcaacaggaatacacgtcctgccagtgcagggttaaagggattgcaacccaaacctccgaaggacatcttgcctaccccgatggcaaacaaggcaccaaggatgataatccagatgggcaggttggaaggcaggttaaaggccagcaacacaccggtaatgatggcagagccgtcggtgatggttgtggtctcttttttcatgaggaatttgccgatggcccattcaaagaacaagcaggctgctacggaagttgccgtaacaatcagcgcacccagtccgaaaaagtaaagcgaaacgaggaatgccggaatcaatgcgataagcacaccgtacatattcttcttcacgctgtcaccgccgtgaacgtggggcgaaagggatacgattaatttattcatacttcgttattttttagcttgacgtgcacggatcatcgctcctaccttacccttacccaagcggatataatccagcatcggacggttggaaggacaagtgaactggcatgaaccgcattctatacacgacataatgtcttctttctctactctttcaaaatctccgtgggccgaaacggtagccagcagatacggctccaaccccatcgggcaggctcccacgcacttagcacaacggatacaaggctgtacttcgccgcgcttggcttccttctcgttcataatcagaataccggagcttcctttggctgtcggtacatccgtatttaccagagctttacccatcatcgggccaccgccgataatcttacccgtatcttcgggcagaccgccgcaagcttcaatcagctgcttcatcggcgtaccgatacgtgccaggaaattggacggctttgccagcgacttgcccgtcacggtaatgacacgctcaaacagaggtttgttcttctgtacggcctggtaaacggcaaatgcggtacccacattctgcaccacagctcccgtggagataggcagcgcaccggctgcaacctggcgactgatgactgcatcaatcaactgcttttcaccaccctgcggatattgtaccttcaagggtaccacctcgatacctgcatagctggaagcaaccttcgtcatcagctggatggcatcgggcttattgttctcaatgccgatgaatgccttgttcacctttaccgccttcatcagaatggatacacctaccataatttcttccgcatgttccagcatcagctgatggtcggcagtcagatacggttcgcactctacggcgttgatgatgacacactctgccttgaatgcaggaggaggacacaacttgacctgcgtagggaagcatgcaccgcccagacctacgataccggcatcagcgattttcttcacgatttcctcggaggtcagactgcattccttcaccaacgtttcggaacggtcaatggattcttcccattcatccccttctacgtcaatgaatatagcaggcttggcgtaaccgctggcatcgacaatcgtgtcaatcttagcgacctttccgctgacagacgaatggatggctgctgatacaaaaccgccgggctcggcaatcttcgtacccactttcacaacatcacctttggcaacgataggcttggcaggagcaccgatgtgctgtcccagcaagatagcggccttggccggaatctctgccttgatgataggctgatgtgctgaaagtttattttcgtgtggatggactccaccaattgaaaatgtcttcaacatacaattctgtatttttagtcgtttatttactttattaattcatacctcaacttgggaagtctaaacctctgctttgggagtctcaacctcagctttaggagctgcaacctttacttggggagctgcatcgtcagccttcggtttgcgcggcgggaagttgagggcaatgattgtgttttgcggacaagcttcctcgcacttgcgacaggatttgcacttattggggtcaatgtaagccagattgttttccagcgtgatagcctcgaacggacaaaccttcacacacttgccgcaaccgatacatgccacggtacaagccttgcgtgctacggcccccttgtccttgtttacacactgtacgtaaatacgacgtgatttcttgccttgaggacggatttcaataatagatttcggacaagccttggcacaagctccacaagccgtacacttttcctcatccacttcgggaagtccggtctccggattcatgtggatagcatcgaactggcaggcagccacacagtcgccgcatcccagacagccataactacaacccgtttcaccaccatagagagaagccgcaatggcacaactcttggcgccatcgtattggttcacacgaggacggttggcacaagttccattacatctcaccaccgcaaccataggttcggcagcagcggcatccaagcccagaatctcggcaatctttgtcatgacgggctgtccacccaccggacaaagtttaccatccagcgaacctgcctttacgcaagcatctgcaaatccgctacaaccggggtaaccacatccaccgcaatttgcctggggaagcacctctgctacctgggcaatccgcggatcttcatacacggcgaatttcttggaagccacgtaaagaatagcggccgataccagcgctataactcccaatgaaatcactgcaatcagaattacattcataaattagttgtttattaattatttgttttattattagttagttcatcggtcgtacggagaatgagaacttcttacccatccgcgacttgttcagccacaatatataataataaggtataagaagtgccagcgaacaaagtgcagaacgcagctcgtcattccagatagccataaagacaaacagtgagattatcagaataaggaaaggaaatataaaggcaaacagaactgccatcactcccattgaaagttcgcccgtcacccatacacggtcaccgggctggtaggatgcggcattggcatcggccacatcgacaagtttctctttcgtatccgcagaggtacaatgccccttgacactacacgaagcgcacgctgaagtctggatgattctcacttggagatgagaaccgtttatgttttccacaataccttgatgttttatagtattcgccattttgcaaagtgtgcattacaaatcgcggcaaatttacgcattatttgtgaactgcaaacctttcctatgcattttctgtgttcgtaaacgtgctttttctatgtttttatgttttttcacctgccacagactacaaaaagacaaaaaacagacggtctgtcaaggaaaaacagaccgtctgactaaccaaaacagataatctgttcactccgaacagaccatttgtttatttaccatttataattgataccgaaactgagcaattcttttacctgaaaatagctgtccccttccgtcggcttggcactgtcgtcatagcgggcgtgcacatagagcttggtggaaagatagcggttcagcacaaagttcaccgtgttttcccattcgatacgcgtccactcataactggtctggaagtccaggcgggaatccagcgtaatggaaggaatgatggtccacgaaagtgtaggctgtatctgcgaaccgaagttatgcttcacgcacttgccctcctcaagaccgaaactcacttcattcacacccttattccccacatagcgcagcatgtacgtcagcggagccatgaaaacggacaagctgaatttctgcttcttcaacttgtagtccataccgatactgctcgaccagtctgccggagcaaagaaagccgaaaccagctcttcactgttggccttgtagccattgcagaactgggtcttaaactcagtcgtgatggtataataccacttggacgcagcctgaatacccagtttactgtacagccggagttggtcggtacttaccagatagttatgaaactcgtcggaaggtgcggagctgaagcccagcttggcatcgagcagattttcccactgcaccttttcacggtcattatagttggcaaacaattgcaggttggcaagcacggcgttagtgctctcacctcccttgtaccagttgtcggagatatagttctgggtaatctgcaatgaaccgtttccacccgtcacccaccagttgggcttgtggataatcacgtcggcttcctccttcactcccaccatattctcttgtgcaaacagtttcacgacggacggcttggaagaaacctccttctctatattatccttgaatatcttccctttcatcacctccttctcggtcattacaaccagattgggacaattcacatacgtgttcagcagcgtacggtccaccagtttgttggctcggtcctttgaggtgaaactcagtgtgtcgaacggcaacatctcgcgcgtcagggcaggcaccgtatcaggcacctggaaatgccagtccaccttggaaaggcgtctcatgggggcataataataggtaaggggaaggaacaacctatagtagttcggattggaaggtatataacgctccggagtcgtggggtcattcaaataatccagcactccgatatacctttcatataatatggaaacagtatccagcctgtaccccataccttccggtttcaatttcagaatcatgtattctttcattatatccggcaaggtgtcggctttggcagttgtttcctgtccactgttcttcgaggcggtatccagcgtattctgtgccatcaccgacgaagaaatcatcgtagcaattaaccaaaatgcaatgtgtctattcttcataatgccctaaagtctatgtttcgagcgcaaatttagcttaaaatgtttagaaaacatagaaaagccataagaaaaaggcaagaaggactttcttcgatgaaatcgtattttttaataattgtttcatcgaaactttctctacttcctcttttttttataattttgcgctttttaagttctacgtgtactgacgggagcagtgcgcaccctgaacgacaagccgtataggctcttggcattagattaaacaattaataaaataatatagttgtgggagaaacaaagtatattttcgtcaccggtggtgttgcctcttcattaggtaaaggtatcatctcatcctccatcggtaaattgctgcaagcaagaggttacaaggtaaccatccagaagtttgacccgtacatcaacatcgacccgggtacactgaacccttatgaacacggcgaatgctacgttaccgtggatggccacgaagccgacctcgatttgggccattacgaacgcttcctgggcatccagaccaccaaggccaacaatatcacgaccggacgcatctacaaaagcgtcatcgacaaagagcgccggggtgactatctgggaaagaccatccaggttattccccatattacagacgaaatcaagcgtaatgtaaaactgctgggaaacaaatacaaattcgactttgttattaccgagattggcggtacagtgggtgacatcgagtctctgccctatctggaaagcatccgtcagctgaagtgggaactgggaaaagacgccttgtgcgtacaccttacttatgtcccctacctggcagctgccggtgagctgaagaccaagcccacccagcactccgtaaaggaactgcaaagtgccggtatccaacccgatgtcctcgtactgcgtacggaacatgagttgagtaccaccctgcgcaagaaagtggctctgttctgcaatgtggacgaaaatgccgtggtgcagagcatcgacgcgcctaccatctacgaggtgcccatcttgatgcagcgccagggactggacgttaccattttgaagaaaatgggacttcccgtcggcgacactccgggactgggaccgtggcgcgctttcctcgaacgccgtcacaaagccgaagagactgccccgctgcacatcgcattggtgggcaaatatgacttgcaggatgcctacaagtccatccgcgaggccctttcacaagcaggaacctacaatgaccgcaaggtgtcggtagacttcgtgaacagtgaaaagctgacggacgagaatgtggcagaagccttgaaaggtatggcaggcgtacttatcggtccgggcttcggcgaacgcggcgttgccggcaagttcgtagccatcaaatatgcgcgtacacacgacatccccaccttcggtatctgtctgggtatgcagtgcatcgccattgaatttgcccgtaatgtactgggctacgccgatgccaactcacgtgagatggatgaaaagacaccgcacaatgttatcgacatcatggaagagcagaagtccatcaccaatatgggtggaaccatgcgtctgggtgcctatgaatgtgttctgcagaaaggcagcaaggcatacgaggcatacggtaccgagcatatccaggagcgtcaccgccaccgctacgaattcaacaacagcttcaaggaggcctacgaagcagcaggcatgaagtgtgtgggtataaaccccgaatcggatctggtagaaattgtcgaaatacccgcattgaagtggtttgtcggtacccagttccatcccgaatacagcagtacggtattgcatccgcacccgctgttcgtagcattcgtgaaggccgccatcgaaaatgaaaacgaaaagaaataatttgtaataagtaatttgtaatcaacaaagaatggataaaaataccatcacaggtcttgttctgatagcgatattgttagtaggtttcagctttctgagccgtcccagccaggagcagttggaagcacagcaacgttactacgactccatagcccaggtgcaacagcgcgaagccgacttgaaagccaaggcggaagcagccctggccaacgaaagcggagcggaagcaagcgttgactccactgccctcttcttcgacgcccgtcaaggaaccaactcgcaggtaaccatccagaacaacctggcagaaataaccgtagatacaaaaggcgggcgcatagcttcggccacgctgaaggaatacatgggacaagacaagacgacccccgtcacactgttcagcggcaatgacgcttccatgaatttcctcttttacaacaagaaagagactatccagacggaagactattatttcaccgcagtaaaccgtacggacagtaccgtcaccatgcgtttgtcggcagacagcaacagctatatcgactttacctacagcatgcacaatgacacatacctgatagactttactatccaggcagtcaatatggaaggcaagctggccgccaccaacaattatgtggacatcgagtggtctcagcgtgcccgtcagatagagaagggttacacctacgagaaccgtctggctgagctgacttacaaaatcaccggagagggtaccgattatctgtctgccaacaagaacgatgaaaaggaagttccggaacgtctggactggattgccttcaagaaccagttcttctcttcggtattcctggcagatgccgactttgaaaagaccaagctgagttccaagatggagactcaaggcagcggctacattaaggactattctgcggagatgagcacgaagttcgaccctgctggcaaggaacctacccagctgttcttctacttcggccccaatcactacaagaccctgaccgcactcgacaaggggcgtgacgagaagtgggagctgaaccgtctggtctatctgggctggccgctcatccgctggataaacaaatggttcaccatcaacatcttcgactggttgtccagttgggggttgagcatgggtatcgtactgttgttcatgacgttaatcgtaaaagctgtagtattccccgcaacgtggaaaacctacatgtcctctgccaagatgcgcgtactgaaaccgaaaatcgacgagataaacaagaagtaccccaagcaggaagatgccatgaagaagcagcaggaagtgatgggcctctacagccagtacggagtcagtccgatgggcggatgtctgccgatgctgatacagttccctatcttgatggccttgttcatgttcgtgccgagtgccattgaactccgccagcagagcttcttgtgggcagacgacctttccacttacgatgcgttcatcaacttcccgttccatatcccgttcctgggaagccacctcagcttgttctgcctgctgatgacggttaccaacatattgaacacgaagtacatgatgcagcaacaggatacgggtgccaatccgcagatggctgccatgaagtggatgtcatacctgatgcctatcatgttcctcttcatattgaacgactatccttcgggattgaactattactacttcatctctacgttagtcagtgtggtaacaacgctcatcatgcgcaagacaaccaatgaggaagcccttcttgctcagttggaagccaacaagaaagacccgaagaagatgaagaaaaccggtttcgccgctcgtctggaagccatgcagaaacagcaggaacagatgatgaaagaaaaacagaacaaaaagtagtaagactaccgttcaagatattcttttgcagaaagccggacaatgacatttgcccggctttcttatccttacgccaatgaaaaaatcacagactctaaattatgcagactaaatacacctacaaacaaatctggcttatagcctaccccatcctaatcagcctccttatggagcaactgataggtatgacggacaccgccttcctcggacgtgtgggcgaagtcgagctgggagcatctgccatcgccggtgtcttctacatggtcatcttcatggttgccttcggtttcagcatcggggcacagatactcattgcccggcgcaacggcgaacagcagtataaggaaatcggtgacttgttctatcagggcatctatttccaagtcgggatggcgacagtcatgttcctgctgtcctattgcttctcgccgattatcctgaaacgcatcgtagcctcggaacatatctacgaagcagccaccagctacctgcattggcgtgtattcggtgccttcttctcgttcagcgcagtcatgttccgtgcctttttcttgggaaccacccagaccaagacactgacactgaactccatcgtcatggtgttgagcaatgtcgtattcaactatatcctgattttcggtaaattcggttttcctgcactcggcattgccggagctgccatcggctcctcattggccgagctggtttcgctgttattcttcatcctctatacccgtagccgtatcgactgctgcaagtacgggctggaccgtattccgaagttccggctggacgtattgaaacggatgctgaacgtctctttctggaccatgatacagaatttcttctccctctccacctggttcttgttcttcctttatgtggagcatctgggagagcgctcgctggcagtgaccaacattgtccgcaacgtgtccggcatactgttcatggtactcatggcgtttgcctctacctgcgggtcactggtcagcaacctcatcggtgcaggccactccgattgcgtggcaggcaccatccggcagcacgtacgcatagcctacgtcttcgtacttccgctggcattgcttttcgcggtgttccccaagctgattctgggaatttataccgacatacccgacctgcaggacgctgccgtacattcgctctgggtgatgtgctccacctatctgttcctggttcctgccaatgtctatttccaggcagtttccggaaccggcaacacgcgtacggcatgggggttggagatggctacgctggtcatctacacagcctatatcacctacattattctgattctgcaactcgacgtggccatttgctggacctcggaaatggtttattccagctttattctcattttctgctggctatatatcaaacgtgggaattggcaaggaaggaaaatttagtatctttgcattgaaataaccgaaacaaaaaacatatatgaaacaagtaaatctactacttatgtcagcagccatgacattggcctcctgcggaggaacaaaagatgccggacagcagcaggacgcagcagcgctcatccagcggtcggacatcaagattgaaggaaagcgtatgacacccgaggcactctgggcgatgggacgtatcggcagtgtagccgtatctcccgacgaaaagcaaattgcctacacggtatcctattacagcgtgccccagaacaagagtaacagcgaagtcttcgtcatgaatgccgacggtagtggcaatacccagataacgcatgacgcctggcaagaaggacagcccacatggttcaaggacggcaagaagcttgccttcctctgcaacgaaagcggcagcagccaggtatgggaaatgaatcccgacggcagcggacgcaagcagctgactcaatacgagggagacatcgaagggttctctttctcgcccgacggcaaaaaactccttttcattgcccaggtaaagaccgtgaagagtacggcagacaaacatccggaccttcctaaagccaccggcatcatcgttaccgacctgatgtacaagcattgggatgaatgggtgactactgctccccatccgtttgttgctgatttcgacggcaatgccatcagcaatgtcactgatattcttgagggagagccatacgaaagcccgatgaagccctggggcggtatcgagcagctggcatggagcccgtcttctgataaggtggcctatacatgccgtaagaaaaccggactggcgtatgccatttccaccaactccgacatttatatctacgaccttgcctccaaggaaaccaaaaacatcacggaagaaaacaagggatatgatacgaatccccaatactctcccgacggcaaatacatcgcctggcagagcatggaacgtgacggctacgaagccgacttgaaccgcttgtttatcatgaacctcgagaccggcgagaaacgttttgtaagcaaagctttcgaatcgaacgtggacgccttcttgtggaacaaagattcccagagcatctacttcatcggtgtatggcatggcgagacacagatttacaacatcgaccttgccggaaacgacaagcttacccagctcaccgacggcatgtacgactatgcttcgcttgccctttgcggagacaagattatcgccaaacgccactccatgagcatgggcgacgaaatctatgccgtaaacagtgcacgcaacggcgacgcttttgcagaagcagtgcaactgaccacagaaaacaagcagatttacgaccagctggagatgggtaaggtggaagcccgctggatgaagaccaccgacggcaagcagatgctgacctgggtgatttatcctccacagttcgaccctaacaagaagtaccccaccctcctcttctgtgaaggtggtcctcagagtcccgtcagccagttctggagctaccgttggaatttccagattatggcggcaaacgactatatcatcgtagctcccaaccgtcgtggtcttccgggcttcggtgtagagtggaacgaagccatcagcggtgattatggcggccagtgcatgaaggactacttcactgccattgacgaaatggccaaggaacctttcgtcgacaaagaccgcctgggttgcgtaggcgccagcttcggaggcttctccgtatattggcttgccggacaccatgacaaacgcttcaaggcattcatcgcacacgacggtatcttcaacatggaaatgcaatatctggaaacggaagagaaatggtttgccaactgggatatgggcggcgcttattgggaaaagaacaacgctacggcacaacgcacttttgccaactccccgcatctcttcgtcgacaaatgggacacccctatcctctgcatccacggagagaaggacttccgcatccttgccaaccaggcaatggccgccttcgatgcagccgtgatgcgtggcgttcctgccgaactgcttatctatccggacgaaaaccactgggtactgaaacctcagaatggcgtgctgtggcaacgtaccttctttgaatggctggacaaatggttgaagccggctaagtaaagcctctcaaaaacgataaaaacaaataatcccggattcttgacaaagagtccgggattatttgtttttattgtacaccgcccgattcattttttatgactataatttgaaagtattaggtgtaatacgtaccttgatagaagtccaagaaaaaatcaaatctcatcccgatttaaagaaacgttactttcttaagcctgatgaagttattttattagcagacggaacaaaaattgttgtcaacaaccagtggggaacattatttccaagatttcttgaagcagcaaagaaactgtaccaagtaaccaatgattcggaaagcaatactccaatatcccgattaaagattacttttggtaatgggaaagtaattcaagagatatgtcttgaaaaatactttttcatgaagagtacgtatattgcgctcaacagtaagatacaccctatcaagaagatatagccataccgttgacaataaatatatcctactattataagagtctgtattgtcatataggccagagagactatgacatgaggaatcttcagttcattcgccataatctgatacagatgcttgcgatgcggtagcccgatattctcatgaagcatcaggcggtgaatgatagtcagtacactatccacaccataaacggataaaaggactatccaactgaaatcttccgtttcaatgatgagcctgcctatcaggaaaagaaggataaaggcaatgctcaccgaacccacatcaccggcaaagcatttagcacgcttgcggaaattgaagaaacagaagactagaacggaacagataacggtatagatgaaatccgcttccacaaaagtaaccacctccttattgatataggccaacgcagcaagaataaccagagaataaccaccggttatgccgttaatgccatccataaagttgtaggcattgatgatgcccgtacagactatcaaggctatgactatccaccaccaagacaaggagaacagtccccactgataaaacatcatagccatagcagagaaatgaaaaagcagtcttgtcatctgtccggtggattttatatcgtccacgaagctgatgaacgtcaccagtgtcaaggcaagcaggaaccagggatattcaaagccactcgtcaggaaataggccaacgctccgaaatagaaaataatcccaccaccgcgtaaagtcactttcgtatgggaactccgctcattgggcttgtcgatgatattgtacctatcagccactctaaaataaaaaagttctgccaaaaacagcagaaccaatattaacagataatacataacagtattttcctctttaatttttaattatcaatttttaattcttaacttttaatttgagaacgattttatcgttctcactatcccctcctctgccctcaccggcattctgtcaattcccagggcagcctttatcttcgcattactcaccacataattctctgtcaacttgcgcagacgctctgtattcaaaggcaaatggagcagagtcccaagccgggcacagaattccatcagtcctctgtttatcttccagatatgcggcttacgctccaaagcccgacacatcaaagctatcagctcattcgtggacaaggcctcgtcatctcccatgtggtagataccactccccacctccttagtcaacagcccttccaccacgtagcaaagattgtctatcgaagtaaaagacctcctgttctcaaaagcccccaaaggccagggaatgcctttcctcaccacattataaagaagattcagattgcctttgttgccggaaccatgaatcatgcagggacgcaggatatagacctgcttgtcatcatacggattaactttcaattctccattttcaacattcaacttgccaagaatataattctcggcagttatcttgctctccccatacggtcctatcggagcaggcaccacatcttcagtcagcatatcacccaccacactgtctgcagcggctttcacagaactgaagaatacgaacttcttcgcagacgattccagaaagaaatcaaatatcttttgagtcaatcccatattgatatcaaaataggcttgggcagcagaccggttcttcgtgtcatgggctttaccagccagatgaataatggcatcgaattcaggaagattccgcatcggaaaagaagctggttcaatatccttccaggagaaagtctttaccaccccctccttttcaggagcaacaatatccagcccgtaaaggctatgacgttcctttagggcaacaacgagattagaccccacaaagccgtggattccagtgataagtatgttcattgaaatatgctaaaaaatatactgaccggaaacgtggttattggttatgtatttaataaaataagtatctccgatgacagagaaaaaaatataccacgtcgtattagaattacgttggtaagtgatgtaatacatatccttaccataacgctcaaaaaaagcgggcgctttcttttttaatttagaatgaatgttctgttgaatatcagctatcagttcttctacataagaaatagcaaaaggataagtacccaaatactccttctcaacaagtatttttataagcccatacaaatcctcctctacttcgggagcgaatacgactctcattcaaacaaagcctttatacgagggcaaagtctatccaataattcttcaccggaaatagcatgcctaatgtcatcacgtccttccgtaacgatattcggattattctcattacccgtatatacaactaccggttcaccaacattcggcaccatcggttcttgttccttatatggcttgttcttcttcatgaatccaatctttctacaaagatacctgggaatatcaagatatcctaataattgattgataaatatcaaaagtttgcctgacaaccttatctatagaaaattcttcttctgccaacagacgagagttccttccaaactccttcctcttcgcatcatcttctatcaataggccgatggcatcagccaacgccctactgtccttggcaggaaccaaataaccattatatccggatttcacgcattcacggcaacccggtacatcggttgttacaataggacgccctaccgcacatgcttcaatcaaggatttgggcaaaccttcccgataggaaggcagtacaacgatatcgctatccgtatatataggaaacatttgagcctgatatcctatccattcaatataatcatcgacaagaagagaccttagcttttcttccccaaaaacagccagattttctttgtcgcaatcacctgccaatatgaattttacttttccaataaatcgctcttgaagtaatttggctgcatcaatgaactccatcacccccttatccaacaatatccttgcaggaaagagtacctttaattgagtcttgccaggagcttgagaaaaaacaaattcattcaaatctactcccgagccctttatcagaaagatatgggacgaaggaaccaaatcgaaacctttgatcatctccacatcatccggattctggagaataaaggaaaaagacttacttctgaatgcaatgcggatcaaagtccttatcaacttctgcaaaatcccattcctaccgttcgtaaagttataccccaatccacttattgcattcacaacattatgttgccctgacagcttagctgcaacagaacctaacaatgcagcctttaaagtaacatgatgaattatatcaggtctatactttttgtagtttgtatataactgaaaaatacatttcaattcatgcaaaggattacttccggaacggtcaaaaggaatatcgataaagcgaatccctttcccttgtaaaaactgttttcttccggtatcccgtgacaataaataaacttcatatccctgctgaatagcattcaaggcaagaggcaaacgatgggaaataaagaaccaatcaacattggtaacaaagaaaagctttttcattttatcataatctgccgtcaacggattctttgggcaagaaacctttgacatcaaacacaacagaccgtgacttcgacagactttcgatatctattcccgtaaactgttgatgggcaaccgccaacacaactgaatcaaacttttcttcaggaagttcattgatcacttcaattccatattcatgctttacgatatccggatttgcccacggatcataaacggttatattcagattgtatcccttcaaagcctcataaatatctatcactttcgtattacgtacatccggacaattctccttgaaagtaaaaccgagtatcagtatattagagttcaaaacctgaattccttttttcagcatcagttttatcacttgaccagccacatactctcccataccatcattcatacgacgaccggccaatatgatttcaggattatagccataactctgtgcacactgggccagataataagggtctacgccaatgcagtgtcctccaaccagccccggcttgaagggaagaaaattccatttggtacttgcagcctccaatacatcctgagtatcaattcccatacgcatgaatatcttggaaagctcattgacaaaggctatattgatatcacgttgcgaattctcaatgactttggccgcctctgccaccttcatcgtgggagccaaatgtgttccggcagatataacagaagcatacacttcgtttactttcttaccaatttcaggagttgaacctgaagtcactttctttatcttctcgactgtgtgtagcttgtcacccggattgatacgttcgggggaatagcctgcaaagaaatccgtattgaatttcaaaccggatattctttccactaccggaatacattcatcctcagtcacccccggatatactgtagattcatacactacaatatcacctttggaaatcactttccccacagtagtacttgcattgtacagaggagtcaagtccggattatggttatgatccacaggggtaggaactgccacaacatagaagttgcaatcacgaatgtcttcaatgtcagccgtgcacttgaagccattggcaatggcagactgcagcaattcgtccgaaacttcaagggtagcatcgtgtcctgccatcaatgcatccacacgggatttattcatgtcaaaaccaacagttttgtatttggtagagaacaaacgggccaaaggaagccctacgtaaccgagaccgattacggcaattttaatttcactttccattatattcgactatatttttcttgttttacagattatttttataccattcaatagcctcatttaaacctctcacaaaatcatattctggctcatagccaagtaagagttttgccttactaatatctgcattagaatgcttgatatctcccttgcgttcagtactgaaaatcggttcaatctctttgtctaaagcttttgttaatgtatagtaaatgtctatgaggtattcacggccaccatatgcaatattaaaagtatcaccagcaacctcacttggtgcaagacatgcctttaaattagcctcaatcacattttcaatgtaggtaaaatcgcgactttgtttaccgtctccattaataataggacgttcattatcaattaactgcttgatgaacttaggtattacagcagcataagctccatgaggatcttgccgacgaccaaacacattaaaatagcgcattccataggtatcaagcccataatgacgagtatattgtttagcccattcttcatcacaacgtttggtcacagcgtaaggagaaagcaagttaccttcctttccctccgactttggaagatggggctcatcaccatagactgaagaactagaagcataaacgaactttttcactttattttgccgtgcagcttcaagcatattgagagttccctggatattgttaccacaataaaaaagaggcatctctattgagcgaggtacactgccccaagccgcttgatgtaacacataatccactcctttacatgctaccatacaagaatcaagattctttatatcaccataaataaactcatagtcgggattactcaaaagcatatccacattagcttgcttacccgtggataaatcatcaagacatcttactttatagccgagatttaaaatagcctcacaaagattggaaccaataaaaccagctccaccagtcaccaagaataaagaaccttggggaaatttcaaatgtttatatgccatatatttacaattattattacattttcaaaaagcaacagccattcctacatttgctgtagaaatcatagacttctataaagcttcatatatttttgtgatattgtgtttatatcatattgtttggcaaaagaatagcatttttcagcgacattacaatataaggttctgtctgttaaaacctcttttatgcgtagagccagttcttcatcatcctgaaactcaaacaacaatgctacacctcttaccaaatcaccaatacctggtacattggaaccaataaaaggctttttgcatgacatagcttcaagcattgaaatactaaatccttcatgtttcgaagaaagaactataacatctgaagcttgtagcaaattaggaacatcttttctcaaaccaagaaaatgtatacgagagtctacgcctactgccttcgcatattctttattctcgttcaaaaaagggccatcaccgatacataataaatgtatatcacgctcaagtctcgacatcgctttgataagagtcttgtaatctttcatgaaacaaaacctagctaccattgtaactagtttacaatctggcttcaaacccatttctgtgcgaatattggcaggaattgcattttcaaataatgatatattaattccattatttatcgttacagtacgtgcatctggaacgtgttttttgagtgccagctctacctcttttgatattgttataatacaatcataaacatgatatactcttttatcaataattctaaacatcaatctccctctacgtctattagtcgtagaatgctctgtatataccaaacgagtattcaccacttttgacattttagctaatgctgccacataaagggatgggaaaagatgaacattcacaatatcatagttacctcttttaataaaatttgctaacaattgaacatttttgaacgatttcaaattttcagataatgcaaagcattttcctccttgttcttccaaaaactgaacaaactccttgtcttccggatctttcaagcttaatacatgaacagtattgccttctatcttacttaatgcagtagctaaggttaaaactaatgtctctgcaccaccacctctcatgaatgaatttatgatatgcaagattttcatcagactcctcgtatattcatcaataatgaaattagtaaatcctcaaatccgcaactacgcgcctaatatgatacagaagcgaaaagaatctgcatcgttagtaaaaagggggcacagtgcatcgaatgtcaccataaagacatataaatgccccttaccccaccatgcgacttgaggcaatacgcaaaatcacgactataagttgtcggtgttatccaaagtcattctggaacacattggcataagcattgttgcatgaatagatattcagcacatacttccttgatgtcctgacccatttggctggcacagagatgaacttaaagacaaacgtcttgatgcggcttgttgctttgagtccgaacctcttcacgtcaagcctcgccatgatgaatttatagaagttgcgtatgagtgccataagcagaagaaacaccgtgttttctcccataaaggattttggaagcctgttccagccgaatccgttattcatatcatcgaagatgcgttccttccctccacggaggttatagaattcgacaatctctttctcggaagactcgtagtcatttgtaaggatgcagcggtaggtgtattctccttcccacaggtcgagttcgccgtctatccgcttctgtctttgaatcacaagacggtatgccttccctttccatttctcgatgagaatggaggccagctcaaactcaatgccgcccaattccactttcttccaacctctgagggcaaagatgtcattgtagagcgaactgcatcggttagcacggatatagaaggtcttgcagtgtttagcaatctcttccactatctcttcagaacacgagccgcaatcagctctgaaacggttgataataagcttgttttgttcaaacctttcaaagaacctcttcagcgtgtccttctggtggaaacggacatttgtgttgccgtcgctgttctcaatgccgacaatcaagttgccaataaccgccacgccagggcgataaccaaggaacttcttgtatgtaggcttcgcatcaaacttctcagcctctatgaactggtggtcgaagtcaacgtcatacccctcgccctctttcagctgccctgtggacaataggcaattgaggagcagtgtattcagcttgtctgccgtgttgaagtcgtaggtcttgccagtgtcggatgtgtaggaaatgttatcctgggtcagttcctttatggctctaagaatcgtgtcggcactgcatgtgcgaagtgtcggatgaagcgaaaggtggtacatcagatgagtggtgacatcctcgatgcatgagccgccacaaaaataaacgctcataagcgaacggatgatttcgctgtattgataaccatacagcctgcatctcataccgagggttgagtcgattacagatgagagtctggagtcaaattgctccattattgaaaatattcctccaaaaggagtgagtttctcggatttaattgctacctttgccatgtctgtcgggtttgatacatattttgatttgcaacactaagataggtgaaaaatctgacatggcaaattcctgagcaactttttgttgctcaggtacttaaaaagttatatttgtaatagtgttgcggaattaaggtaaataaaagttaggtattcctgaatagcaattcccatttgtcaaaaactctacacgactcaaattcaaaagaagccttcttacattcttgtgcaagaaatgttgctttttgagaatctgtaagaaccgccaacattcgtttcgataaagtatctgaatctcctaccgggacaagatactccctaatgctttctggaaatagcattcgaggacctccacaagggcaatcggttgatatacaaggtagaccaatagccatagcttccatcaatgcattaggcattccctcaacattcgaagacaaaacaaatagccgcgcactttttatgaaagtaggaacatctgatatttggccaggtagatgaaccctttgtcctataccaagtgactcagcatatagtttcaatgaagtaacatctcctgatccatatattataagattatcattcacttgatttgcaattttcgcaaatgattcaatcagtaatctatgatttttgaatttgtcaattcgaccgaccgtaactattcccgaacgagactcgcttagtttcgtattgtagaaaacccgatcaataggattatatataataaatgatttcttccgtattacctctggaaaccatatcttagcatcatgagtttgaaaaacaattgcatctccaaaacgaaataatattttggccaaaaaagatgtaaaattactgccatactcaacatccggactgctgcgaactgaaagaatggactttatgccagaaccaagttttgcgattattgctcggaaattaggttctgccataaatgaaacaagaatatctggcctttccgatttcaataattttctcaatcgatatattagtattacattccttttaaaataaccttctatcttattcaaatctaatgaaatacgctgaacatcttctccataagaatattcccatgaacaagggaaagatgttatcctcaaatccgcaactacgcgcctaatatgatacagaagcgaaaagaatctgcatcgttagtaaaaagggggcacagtgcatcgaatgtcaccataaagacatataaatgccccttaccccaccatgcgacttgaggcaatacgcaaaatcacgactataagttgtcggtgttatccaaagtcattctggaacacattggcataagcattgttgcatgaatagatattcagcacatacttccttgatgtcctgacccatttggctggcacagagatgaacttaaagacaaacgtcttgatgcggcttgttgctttgagtccgaacctcttcacgtcaagcctcgccatgatgaatttatagaagttgcgtatgagtgccataagcagaagaaacaccgtgttttctcccataaaggattttggaagcctgttccagccgaatccgttattcatatcatcgaagatgcgttccttccctccacggaggttatagaattcgacaatctctttctcggaagactcgtagtcatttgtaaggatgcagcggtaggtgtattctccttcccacaggtcgagttcgccgtctatccgcttctgtctttgaatcacaagacggtatgccttccctttccatttctcgatgagaatggaggccagctcaaactcaatgccgcccaattccactttcttccaacctctgagggcaaagatgtcattgtagagcgaactgcatcggttagcacggatatagaaggtcttgcagtgtttagcaatctcttccactatctcttcagaacacgagccgcaatcagctctgaaacggttgataataagcttgttttgttcaaacctttcaaagaacctcttcagcgtgtccttctggtggaaacggacatttgtgttgccgtcgctgttctcaatgccgacaatcaagttgccaataaccgccacgccagggcgataaccaaggaacttcttgtatgtaggcttcgcatcaaacttctcagcctctatgaactggtggtcgaagtcaacgtcatacccctcgccctctttcagctgccctgtggacaataggcaattgaggagcagtgtattcagcttgtctgccgtgttgaagtcgtaggtcttgccagtgtcggatgtgtaggaaatgttatcctgggtcagttcctttatggctctaagaatcgtgtcggcactgcatgtgcgaagtgtcggatgaagcgaaaggtggtacatcagatgagtggtgacatcctcgatgcatgagccgccacaaaaataaacgctcataagcgaacggatgatttcgctgtattgataaccatacagcctgcatctcataccgagggttgagtcgattacagatgagagtctggagtcaaattgctccattattgaaaatattcctccaaaaggagtgagtttctcggatttaattgctacctttgccatgtctgtcgggtttgatacatattttgatttgcaacactaagataggtgaaaaatctgacatggcaaattcctgagcaactttttgttgctcaggtacttaaaaagttatatttgtaatagtgttgcggaattaagggttatcaaaacacattcatgtccacgagttgacatttctgttgccaaattagtcagcactctctcagcccccccactagatatagtattaatatagaaaaatatcttcatagctatttttttaagaatttttcttcaggaagtgtcaacaagaagttccgtttttctcttagtgataaattcttgccatgtatttgtaaattaaatttcagattcttctgaatgtattcgtctactgtacatatatagcgggcaggatttcctcccactactgtcctaggaggtactgatttcgttactacactacctgctgccacaatagcaccttctccaatagtaacacctggcataatttgagaatatgcacctatataagcccaatcttcgatttgcacttttccaaatacatcaaaatctggaattcgagaacgcacagagttccctcctccatgtgtgtgaatagctacgccactcgtaatttgaacattattaccaattgtaatcagataaggttcactactccatttcctcgtagctataaaagaattttcaccaacaaaaacacctatatgtctggcgtagtcaataggagaaactaaaaatctccaataaaaatcaacaattctcctaaaaggattcagcataatttataaactaaaagaattactcataaatgcacttgtgaagcaactgctcccacaatttagatatatggtctactttatatctgtcgagtgcatgtaatgcattatgttgtagcctcttgcgtaactcattattgtctaataatatttttaatttctgttctaattctaacagattatcaattccacaaataagacctgttttattattaattacaatttctgattggcgaccgttataatcgcaagcaatacaagcacaaccttgtgacatagcttcagtaagcactaaaccaaaaccttcgtaacgactactaagaacaaatatctcagcatcacgatattctgttttaatctccttggtatatggaacaaactctacattagatatattctgtactaacgacttcaaataatctacattttttttgtgtccagcaccgactaaccttagagtccaatcaggataaaagcatgcaagattgctccatgcctttaacaaaatatcaaagcctttgcagtaccaaatatccacacgtccaacagcaagtattattttactttttgatggaattactttttccggttcccaagtcaaaggattaggcataacaactacttttttgaaacgaccgtttaaaaacgtataatcagcttgtgtcaagaccgtcagataatcaaaataatagtttctgaaaaatttatctattttttggttcaatggaaaaggggctgattctggtcgttcaaaagaattatggtcagaaactatcactggacacttatgtaccaacatggatgccaatttagcaagtgttgcatgaaagtacaatatacttactataacatctggtttatatttctttaagacttccaatatcttccaaaatattttgatacgatacatgatccagcaattaccctttctttctggacaagaataaatttgcacatctgctaatacgggataaacgatagctattgatgtatccatcataattgcaacattatgtcccaaacggctcaagccattcgctacatctgcacagacacgttcagcacccccaccagtaagttgatggcacagaaataatatattcataataattgctacaacttgatgttatctatactaaatgtctttgaagtagctccagatgccaacatagggaacaagaaaggaagacataggcaccaatagaattcaagcatatttgacttgtagaatgctccgaagaatgcaatcacaaaacacattcgaagccgatatggcacacgatattgacgataatactgattaatgaatttccaaaacggacataagagtaaaatcaaccctaaaacaccatatttatacaaaaatacctttcctccagtgttccctgaatcatattccatatcatcaggaagtactccaccatgaccataaattatcgacccatcgaaaatggaagtactgagggcactattaagtgcgtcacccgttctattatcaatatccctaatatcctttccactaatacgttccatgactaaagtctcaaactgctcacccaaaattaaaggcattgtcaatacgcaaacagctgtaagaacaattgtacgaatcttgaaacgaattgacaacaaataaatggctgcaagtatataaaatcccaatgagaatgaagctagaccaaaaatccaaaaacagtaataataaattttatatcgaggattattccctaccagaaataacatcaaatagcaaagagtaccaagttctccaggttcttcacaaaagctttgaaaccgaatagtagagtttataataaagaaattgaaaagatgttgttcgaaaagctgttcgcgaccagaattatcacgaatgaaataagcaatcagaataccctgatcagtaaaaatataaaggaggtattcaattaacgacaaggacaaaaaaaacacgagagatttgaccaaccaatcaaaaaccgtaagtttccatttgtcattgagaagtataaatataaacgccataaaggcattcattaaaaaagatccactaggatattctcccaagaaaaaacctgcataaaaataaataaaaagataagctaatataaatggaaatgcatatcgcttgtactttgatgtaaaaacacttccttttttatcagttaacccaatgagaataaacaataaagcaaaaatcaggaataaaatgatattaatacgacctccccaaatcaacattaaaattccaccccatgttaatttaattccagcaaatatattccaaagaaaatataaaacagtaagaattgtaactactatacctttattcacagcaacaagaaaaatattttttacaaataaaagtttactatcttatattccttactcttctttcaattctgcaacattgaatcatcgcttgtttttccacattcctttgatatttaccttaattccgcaacactattacaaatataactttttaagtacctgagcaacaaaaagttgctcaggaatttgccatgtcagatttttcacctatcttagtgttgcaaatcaaaatatgtatcaaacccgacagacatggcaaaggtagcaattaaatccgagaaactcactccttttggaggaatattttcaataatggagcaatttgactccagactctcatctgtaatcgactcaaccctcggtatgagatgcaggctgtatggttatcaatacagcgaaatcatccgttcgcttatgagcgtttatttttgtggcggctcatgcatcgaggatgtcaccactcatctgatgtaccacctttcgcttcatccgacacttcgcacatgcagtgccgacacgattcttagagccataaaggaactgacccaggataacatttcctacacatccgacactggcaagacctacgacttcaacacggcagacaagctgaatacactgctcctcaattgcctattgtccacagggcagctgaaagagggcgaggggtatgacgttgacttcgaccaccagttcatagaggctgagaagtttgatgcgaagcctacatacaagaagttccttggttatcgccctggcgtggcggttattggcaacttgattgtcggcattgagaacagcgacggcaacacaaatgtccgtttccaccagaaggacacgctgaagaggttctttgaaaggtttgaacaaaacaagcttattatcaaccgtttcagagctgattgcggctcgtgttctgaagagatagtggaagagattgctaaacactgcaagaccttctatatccgtgctaaccgatgcagttcgctctacaatgacatctttgccctcagaggttggaagaaagtggaattgggcggcattgagtttgagctggcctccattctcatcgagaaatggaaagggaaggcataccgtcttgtgattcaaagacagaagcggatagacggcgaactcgacctgtgggaaggagaatacacctaccgctgcatccttacaaatgactacgagtcttccgagaaagagattgtcgaattctataacctccgtggagggaaggaacgcatcttcgatgatatgaataacggattcggctggaacaggcttccaaaatcctttatgggagaaaacacggtgtttcttctgcttatggcactcatacgcaacttctataaattcatcatggcgaggcttgacgtgaagaggttcggactcaaagcaacaagccgcatcaagacgtttgtctttaagttcatctctgtgccagccaaatgggtcaggacatcaaggaagtatgtgctgaatatctattcatgcaacaatgcttatgccaatgtgttccagaatgactttggataacaccgacaacttatagtcgtgattttgcgtattgcctcaagtcgcatggtggggtaaggggcatttatatgtctttatggtgacattcgatgcactgtgccccctttttactaacgatgcagattcttttcgcttctgtatcatattaggcgcgtagttgcggatttgaggatttactaaaatgctatatatcatgaataataattttcgcctatgtccatgaccatcaacgactatcaaacctttatacatattgaaagtatggtatcctaaatccatttttttattggttgagaagaatgttttaacttctgaaaacaaaaaacattcaccgacagattctattcgttgaattacaattccattcccataatttttattacaatcctgtgcaggtctataatattgaccatcaacgacaaacacttcaccggcattgcgtgcaacttttcctccaaattttactttttgaactggtttatcatcaataaccatcttttcataatcgaaattaaacaaatataaatctttatcattaggaaatggaagttttgtcgaaagtatataatttgtgtcattccaatgtagtacggttgcgtctgttaacggtaaatgtgaaaggtcgttattttttatcatagaatccgtcaacaaatcatattcgtaaacggctgcagtcgctgctttacaactctctggaataatatagatcttgtcgtttttccttaatataaaagggaaagacaaatgccatggttcttccaatacaattttcatctccttcaagatataatctttacggctaactaccaattttgcgatacgtcctttattaaatgaataacaaaattcctccaccaaaaggattatattctcctcatctacattcagaataaaaggatcagcgaaccatctgtcgctatattgatgcttcatccaatgtatattctgcaaatcatttcgaataacacattgaactttatcttccacaaaacctatattccatgcagaagataagcagtatttccttatgcaaccaattaatgacattgataattatttatatctatttctaattttatatagtaatgaattaaagatgaatcggctaaaaacaatatccccaaaaactatatttattaatcggatagaattataatatcaaattctttttttacatattttgttcaataacaaattgagtttttctttggtataatatttaaacaataaatatttattcaaaatagtatagtgttgcaatatatactcaattcctttttgatgataatctttccaaaattgttcatatgctgaattcttctgtgaggacgcctttgattctcttgcttaaaataggcaatctcagtcgtagtctcaaaactatcaatattttgcaaattattaaaaatatttaaagcattattactatttatcaataccaatgaaactccatctttatcaaaatattgaggatgaaatattgaaataccccaaaaatcagctattgtaaaatctgctgctcttcccatctgtgcatatggacattcataacaatggggcctcaaacaattatttgaaaagaaaagctgctgataagcaagcgtaataggcttgtcacaaacgttttcaccgtcagaatagcatactgacggtgagaatgttttacttccaaatccccaacctttagcctttgtccggaaataaaaattattcactggtttccgcttacttagataatctatataatcctcaaagatttgaggactcggtacaccatgacatattaaatcaatcgttacaagatttgaggtagatatattcttacacagtaaataatgtcgaagtccatctatattacaagatgtcccaaaataagcaacaaaaagtccatatttcaaatccgcaccagcttgtctaaaagtctcgcaaggatctgtctgcacatatttactaccttttaacttaggtaaatcagctctactgttaatcctaactgtacgaacatatttgacatcatctaaagcaacaccgtatacaactcctcctttgcctatcacataatctgataatgctgctgcaaaaccaccagatgtcgaagataattgttcttgcttattaatatgttttgcaccaaaacacttaatcgatttataaaacttaggtgataaagaaggacaagtcctaacgcataaaccacattgagtacacaagttttcatctatttccggatagctaaagccttgttcatctctcttcatagaaatagctcctcgtgtacagatagaataacaagctgtacaaccgcaacatttttctttggacagcagcccaacatgtatcatttcattcatggttatctaatgcttgttttagaacttttatagaatatgatctgaattgatctattaagaaatcaactttagcataatcaatagggatcacatttaaaatattcgtaatatcatttccgcaatggttctctattcctaatttagaacctaatgaagccatacgagcttttaacccataattataataaaaaagctcacgatgataataaataccaaaaagcataccatgatacgaggccgtaaaaaaagccttgctatatttaataagtcctaagaattctgcatgacttgttggccaaacactttcaaccccccttttaggtaaccccatccgtatgcttttcagttttaaatggtgatgatttgcatattccaatgcctctctctccatttttcccgtaggatcaccaaaataagtaagcacataattcgattcgtattttttcggttctatcaatttatcccattctttacttgtatataacatagttggatcacaaacatagtttgcattttttcccgaaatagcttttacccactctacagcttcttcctcgcggaccgaaatagaatttaatcttctaagtaatactggaagacattgattatctcggtacatatcagtttcaccaacagatgatgaaaatgcgactttatatttcgcatcatctgcaaaatccaagaaataattatagtcatagtttgttatccttaaagaccaaacgacatccgaccctatcagaaaagaattatatctatgatttgcatcctttatagtatcgggataataaataggactaacctttgtatattttctgagatcaagacacagtgatttatactttttcttttgtttataactatataacacaaatgcaactatctttttaggacttaaacctactaatcgaaatgatttagtctccctattgattaactctggacttcggtaatccacaatttcacatgtatagcctaaatcttttatcttgttatacaaagcaatagtatgcaaatgagctccaaaattatttgtcaattgaaaggtcaataatcctatcatgttttttcaaaaatttattatttccaaatattgccataaaatttactaacacatccattaagtgccttcctatcattgcctgatattacaaaatagtaatacattatcaaatgcaacacagaagaaagaataatgacaataaaaaatctcatcgcactatcaggtgtcacatatatatacaatgttacaacaatacaaattacaacagtagcaataaaaagcttgataagttcaataatatattcgagaaaaggaattttaataagtttatgcaaaaaatagattcggcacatcatagccaaaaaagaaaaagaaatcgtaacaataaatactgactcgggggagcacccataatgcagtaccacataggatatgggaagagtaaatattataagatttccagtaatcaaatagaaattacgaatcttacccgtagctaaaattggagcaatcataggcccagataccgaatcaatcaaaccattgagaagtacaagtgttgtgaacgctcgcgtatattccggtacttctacaagccataaatcaagcaccgtgtcaagttcaaaaaacaaaggaattgataatattgaagtcagaaaaaaacatatctgagtacttctgacgattaatgtatgcaattgagaataatcatgtactgcatacaatttatagatttgtggctttaatgccaaaaaaaaattattttgcaattgcattactgcactttctatctgaaatgctattgcacgagctgtattcactatcggattgaaaaaaacattcaaaagtacattaataccttgccctcttaaaactacagaaatggttccgagcagatgccaccctgaaaatgaggccaattcagctatctcaattttattccaatatacataataatgaatttgtggtatttttcttgaaacataccctacataagaaagtgtaattgatacatttattacaaaaatcaaaattccatacacaatcaacttgtctgttgaaacaaagtataaaatccccacgattgccaatttaaacaacgcctctaacatcccaatataggcaaatgttttcattttttcatatgcaataatcaaagccaaatatgtagtattgacaaggctacaacagaatcctaacaatgataattgaaaaattatatttgctgccgtcaacctttcgattggtattgtcattttattatttataaaccataatccaaatgtttcagctatgaaaatcaaaaagacaatgattataacaaataagttaagattcaaacaaaaccaatcatttagtttcctaaaatcattctcggccaaagatattgagaagtatctttgtgacgatgaagataacgttccactaataaaagagaacattgaaacgaaacctccaatcacattatataagccgtagtcagtcgctccaagaagactcaaaattgcccgtacagtatataagctgactcccattacaaatatcagcctaatataaagaaaaatggtattcttggctattcgcttattatcactaaaattagacatcttatctatatcccaatatacacttaaaatgttttttacaaaaaaggataatgggtataaaaactgccaatatcaccgatgccagtaatatacctaccaacgaagtaatcggaatactagaaaagataaaattccatactactttagcatattttatcatcaacaaattgaaacctaatataattattgtaccagatgcaattaaactaatcttatttccaagttgtaagtatctggcaatttgaaatacacatattgttccaaacgttccatttagataaaaaagcaacaaagaatttcctatctgacaagtatttatatctactctgccattgtaatagttaaaaacaataagtgccacaaaaattatcaaaacaacataaaaagacaaatcacgcttaaaaaattccttcatctcataaccagcaataaaaaaaggcatcgcaagtaaagtgctatcaatgggaactaaggtatcaatttcataatattgcaaaatcaaaaaaacaccaatacaaaaaagaaccagtaacaatctatatgctctatcttcccttaaggaagttaatatatgtaaaaaaaacaagactgattaaaaaccaagtaggtgcactaactggagacaagtatcctacgttataccccagcccaacaatcacagctaccacctttcccaaaaacatctggacatcaaatgtacctttcaatataagtaatattgaagtatatgccaaaattattaagttgattataaaataaggaaccaacaaagtatgccatccttttttaagagattcaatgaaattacgatatttgaacaatattccagaaaggataaaaaataaaggcatatggaaagaataaatgaaagtattcaactctacactcaccaaattcccatgtcccagtgtaactaaaaatatgccaatgattttagtccaatcaacccattccatgtatgaaggctgagaaattggggttaaatatttattcagcattatgacgataagcacagaatattctaacttccttctcctatctcctccaccagcgacgcatgcacaaacgtcgtcgccaccgccatcaccccctcgatgttcaccaccaccctcctatcatggcgcacacgcacaaacaccccttccactccttcgaagatgccgccggtgatgcgtacccgggttccttgggagaggttcagctcggtgggttcaagatagagcacagcctggtcgtaggtgccagacacggcgatgaagctgcgcatctgtgagtccgggatgacgatgggctggtgggtttcgcggtccatgatatagcggatggggatgttcatgcccggtttgttctttatttcgtccatacgctcacgggtggagcggacgaagaccaggttatggaccgcaggaacaagcttgcgcaagcggcgctctttcctcacgacatactcatagcgcatgggaatatagttttcaatgccctctgcatccaggtattccttgaaaaaaagctctcggctataggtgacacgcactgcataccagtgcatttctgcattctcgttcacaaaaaaatatgattaggggacaccggagtagcgaagtacctcccggtcaagtaatgtaatgcggttactttaaatagactatgtgcattcattttatttcaagaccctccaccatctcggaaggaaggcgacgaaatagttatattcaagctatcttgcgataagctgttatcaacgaaacgtttatgatgaaagaaatgttttataacacgttccttttaatgaacgcaaaggtaacgtcaagaaatgaaagtacaaaatattctgattgataaaatgataatcttttttaatgcagacatcatcacactatatatcaaagaattacgcctattaggtaagatacacgcgcacgcgcgtcatttcttatctttttaaagaaagggtgtgttacatatataaccataggttccggtacctcaccctatacatacagactacacacacgcttcactagttcacggagaggggcaccacagattacacagattggcacagaggagcacagaggagcacagagaagaattcttcgctacgttctgagtgacggatactcacggaaacaaaaggatgatacgcacggacatacacaaaagtgatacgcacagaaactacaaaaatccgtgccaatccgtgtaatacatagtgcacagacttctcttttttattaattttgcacccgattcgttaacttaatataaaattgtattttcaaattgtagttatgagaacaaaaaaacgccaattagcgtgatgcaaatcaaagggagagattaccaagtgctgtacaccaaagagagcaaagaggtgcaagtagccatcgacctgctttctatggtagaacacaagtcgttaaccgtggaatacaaggagcggaaggctttcctgacacccttcataccactgctgataaatccccaaaaggaacacggactgaagggcgtaagccccttcgccaagctgctgcatctacttgtaaactttatggacgcggacggaagcggcaatacgctgaaccccgattgcattgaggatgagatatataagctcttcaatgagctatatcccaaggagtaaaacggaccaaggaattcaaattgtaaaaaaacggctgtcccactgcggatggccgtttttgcttcctaaggaaataaacggcatctttgcgccgccaataaggcaaacttaatacaaatcgaatggaaaacattccagtgaccacctaccgtggtttcagcgccgtcagcggggagacaaccttcacgcaggacatggctgacataagaaacggcaagcatgccaagttaatcatcaaaatcgccagcctcgtggcgcagggaaaggtggaggaagccaaccacgtcaagaagcagcttcccttcagaaccctcacggccaactaccgggaaagaaggctcgcaccgagcatcacccgctacaaccccgtcatcacgctcgacatcgacgacctggaagagagacagttggagcagacccggaccctcatcaacgaagacccgcacaccctgggcagtttcctctcccccaaaaggcacggctacaagctgttcgtcttcatgcagacggaatacacccggcgtctgtatgaccgtctccgacagggcgaggtgacctacgccacgctcgaggagatacacctgaagctgtacagcgccgccaaagagcactacgaggcccttctcggagtagaggtggacggaagcggaaaggacatctcgcgaggatacttcatgtccttcgacccgcatgcctatatcaatgccgcactgctggaacagatttccccgttgccggcacgcatcatcccgcctgcgaagaaggagaacagcccaaagaagacgcccgtcgaaacggtacaccccctccccgcctcctctgccgccacaccgcaggacgcaaagccttgggagaagctgatattctcccaagccgtgactgccgtgaagcgcaccaccaggttccgggcaggcaaccgcgacaacttcctcttcgccctgggcaacaaatgctacagcaagggcctggacgagcagacagccatcagactggcgaaaaacgagttcggacaagagtatcccgacgtggaatctcccctgcacaatgcctacatctataccgacaagaccagcgaagccgccacaaagaaggaagagaaaaagcccgtcatcaaccaagtgatgagctttctggaagagcactacggcatccgcaggaacctcatcctggaccgcctcgaattcatgccctatgccctgtcggcagatgccggaaaaggttaccgtcccatgcgcggaaaggactacaacaccatattcgtagacctgcagatggccggcatctcctgctaccagaatttcctcagagccgtgatagactccaactacgccaaggagttcaacccctacaccgactatctgtacgcgcttcccccctgggacgggacggactacatcgcccggctggccgacaccctgacgaccgagaaccgggagctatggcagaagggcttcaaacggtggatagtgggcctggtggcctgcgcactgagcgacgaggacatgaaccagctcgtcatcatcctctacagcgagcagggaaagggaaagagcagctggattcggcgcctgctgccgcccgagtggaaagagtacttctacaacggcataatagacccgagcaacaaggacgatgcccgcctgctcgccacgcgaatcatcatcaacatggaggagttcgaaggcgtgaagcccggcgagctggcagcattgaagcgaatcatcgcgcaggacaacgtgacgcagcgcaaggcctacgacatcgaagccttcaccctgccccgccactgctccttcatcgcgagcaccaacaaccggcagtgcctgcaggacatcggtggaaaccggcgtttcctccccatcaccgtcaccggcatagactaccacaccccggtgaaccatcccggcatctacgcccaggcgctcgccttgctgaaagacggtttcagatactggtacgagggcgaggagatagaacagctgaacaagcacaacgaacggcaccgcatgaaagaccccgtggaggagaacctcttcgtcttcttccgcaaaccgctgcccgaggacctgcaggtaaaatggctccctgccagcgtcatactgaccaagctcagcatattcgggaaggtgcaggtgaacccgcacacccagctggtactggtgcaggcactggaaaagtacggattcggtacacggaccaacgagcaggagacgaccgaatatgaggtagtggacatccagctatatcagtaaccggtattcgaggagaagagagaagccccgtaacatatattgttgtgcatgacaacatatattgttacggggctttacatatattggcgttttctttacacggcttccctatttccggccggcatcctgtcagggttctcccagatacttcaccagcactttcacttccagcggagtgaaggtgcgccggtatttgttgtagcccaccttctccagctcacccttcagcgccttgttgtggcgtatccatgccgccagggtatagatggcattgctgatgcagtaagtcgggttgtagagcatggcaagctcctccttcgaataggcgtggatgcggaacggacgaaggtcttcctcctcctcttccctcttttctttttctgttttcattccttatgttattggttgattattacaccataaagatactgaatatcagcggtatgaccaagcgtatacagacataaacgggcatcggacgaagaacttttcctgaacagaaaggaaacgggaaagagacggcgtaacccgaagaaagccatgagcagaaaaagccggagaagtacttttgcagcacccctcttcccccccctaaaggagaaagagaagagtattgcaatacgggactttaatttctaattgttaattgttaatttttaattatttaattgtttatgggagtaccattcaagaaaattgcgaggaaagatcctcgaaaggcagatgcggtggcaaagttctacccgcagctggtgacactgggcgacaatgcgacgctggacgacattgcgtatgtgatgaaagagaagagttcgctgacgctgggagacatccagagtgtattgaccaattttgtggaggccatgattacgaccctctacagcggccagtcggtgaatatcaagaacttcggcgtattcagcctgtcggcgcgtacggcaggcgtactggatgtaaaggagtgcaccgccaagaacatcaaagcggtgaaaatcaatttccggccttccagcaccgtaagaccggacatcgccgccacgcgtgccgggcagaagattgacttctacgacctggaggcattggtgaacaagggagacggtgaaggaggaagctccggcggcggttccggctcgggagacggaggcggttcggacggagaccagggcgaaaatccgttgggataagtatgactgattttactaccgattcgtatgttcaacttttaaaacgtatatagcatgaaaaaaagtatctgggataaaattctgaaagtcgtaattgcagtagcctccgccatcttaggggcattgggagccaatgcgatgaacgtgagcatttaagtcgccggaaagaaaggacggcaggaagaggaaaccccgaaaaaggtttcctctttttcttccctctctatacagcgcaggatacgccagtcgcagctacgcacccaatagcggaaagccatgttcggacggaaatgctccgagaagtccagcagacgttccaaatcgaactcctcggagatgacaccggcaccgctacggaatgcatcgtaggcgttacagtcctgctcgatatgcgccggaaccatcagcaaaggcttgcccagatacatcgcctcgcagaccgactcgaagccggcagtggtggcataggccttgcagcctgccatgtagcgcaggaacttgacgtcatcgagctgatggaaactcaaggtgtcgtccacacggcacacctcggcttcgtcctgcttgtcccagaagaagtggaggggtatttccggatgggcactgtgccagtggaggatattctcgccaaaaccggagtttaccatgtatccgtggagataatccccttccgtaccttcgcacgacagcacctccctccgcagcaatggcggaaccacgcggacatacgcttcttcgtcatcctccatctcgcggaaggaaagggcgagcttttcgcgggcacctatgcacgtgaggcgggtgaaaaggcggagcagccacagatggaagccgttcttaccgggaaactcgaaatcgcggtgcaggaacaggtactggtgcccgacgcttatttgaggaacggaaggacggaagaagagataggtcatccccgtgagcagttcgtagaagttgatgaccagttcggcaccactctcctcgatgcggcggtgtatatagtgcatgcttttcagatagacgggcaaacgggtgagattataggccacactacgcgcaagacttgcccgcttgttggcaggcgtaggcaggaaattgggactgagaaagcgtttcaccggagcttgaatgctgcggttgaagaaaccgggcagacagcgcgaattgcttttgcccaccaacacttccactacttcgtgaccgttgcggcgcagcagctcttccattgtaatggcttgggtcagatgcccgcggccttctccttgaacgataaaaaggactttcattgagacgacttgatgatttacaaattactgttgaaacacatgcagcacatgacgttgcatttagttgatgcaaatatcgcacctccgtgttacggcagaatgtgaagaatgtgacaattcggttataaatgacaaaagtcacaccggcatcgcgcagacatgacttcaagagaatttatggaataaatacgtaaaaaggataattcggtcggcatatgatgccggaatatcagacaaattcctcgaccatatacatatcactgacaaaatcgtcaacaatctgttccaggttttcgcaggcttcgtcaggcgtttcaccgtaggcgctgcacaacacattattcataaaataagcgtaaaaaccaccgccggctgccgcctctacggtatagtcatttctgttcagtttcatattcgggcctcctttctttttttacgctgcaaaaatgagggaaagttgttacgaggagatgtgaaggaggttacaatagtatgtagattggttggctttgatgcagtggaaaataaatggattgaatattaggagttttcatttattcagtttacctttgattaaaaataaaagcaatgggtaaaattaaaccatataaagagcaggactcttccaaacaaacggcacaagaaccgatgatggcaacttatcatcaatcagccataccgatggacgactttatcaacagtattccccgagatgctttggctgaagcccttctatttgccttagaagagaataaagcaggacactgtatatcaaactcccaaatagagagtatgataaatgaacgcatgggatggaaatagtctggtctaagttggcttatgagcactttttagagatacttatttatgtagagaataattttggcatgttgacggcacagaaaacacgtcaaaagatacaagacaaagtaaatcttttagcaaaacatccgtatataggaattatagacagtaatttttctactctatttaacaacattactgtccgtcatttaaaactttcccctaacgtgatatattatttgattgatgagaataggattgtcattgcagcaatgcttcattcaaaacaatctccggaaactgtacgtaaaacaatctcagaatttctgaagcaatataaatagctgttcatcaattcatgatgagagataactctataaatttaaaaccgagaggacgtatcaagatatacaatcaccccggattacgcggattaacgcagataaaagtttctgattatcagaactcctaaaatcatctgtgttaatccgcgtaatccggggtgggtattattaataggaacgtgcgaaaatcacgcggcaggcagaaggcttgccggtaaccatacacttgcccggttccttgtcacccggaacaaatgaatcgaagggaatacaacggatggttgctttggtctcttccttgattttctcttcggtttcggtagtcccgtcccaatgagccagaatgaagccgccttcttcaatcttttccttgaattcctcgtagctgtccacgctggtgatgcggctgttacggtaatcgagcgctttcttgtagacatttgcctgaatgtcctcgagcaaatccttcacgtactcttcgataccctcgcaggaacgcgtctccttctccagtgtatcgcgacgcatgatttccattgtattgttctccaggtcgcggccacccatcaccagacgaacgggaacacccttcacctcatagtcggcaaacttgaagcccggacgtttgttgtcggcattgtcgtacttcacggaaatgcccatcgatttcagcttggcaacaatgcctgccactttctcgtcaatcttagccagcatctccgcattcttgtagataggtacgatgactacttgtatcggagccaggtgcggaggaagtaccagaccgttgtcatcggaatgcgtcatgataagcgctcccatcagacgggtggaaacaccccaggaggtagcccaaacatactccagcttgttctccttattgacgaactgtacatcgaacgccttggcgaagttctgtcccaagaagtgggaagtaccgctctgcaaagcctttccgtcctgcatcatcgcttcgatggtgtaggtgttgagggcacctgcaaaacgctcgttggcagacttcacgccctttaccacgggcaccgccatgtatttttcggcaaactcggcatatacattcagcatctttaccgcttcttcttcggcttcctcgcgagtggcatgtgccgtgtgtccttcctgccagaggaattcggcggtacggaggaacagacgggtacgcatttcccaacggaacacgtttgcccactggttgcacaagataggcaggtcgcggtatgaattgatccagttcttgtaggtgttccagatgatggtttcggaagtggggcggataatcagctcttcttccagttttgcagcagggtccaccaccacaccgccgccattcggatcgttcttcaaacgatagtgcgtcacgacggcacactctttggcaaagccttccacatgttccgcttcacggctgaggaatgatttcggaataagcaaggggaaataagcgttgacgtgtcccgtttccttgaacatatcgtccaactgacgttgcatcttctcccagatagcgtatccgtagggcttgatcaccatacagccgcgtacagccgattgttctgccaaatcggcttttaccaccaactcgttgtaccactgagaatagttctcactacgtttggtaaggtctttcaattctactgccattctatttcgttttttaaagtttttcctacgtttaaaatggcttgacccgaacattttcctcgatatttaaaaaaaggcagccgctgtgatgcaactgcctaactctaaatggaggagcggcaagcgagactcgaactcgtgaccctcagcttgggaagctgatgctctaccaactgagctactgccgcataaacatttccaaggtcatgccttaaaaacggtggcaaagttaataaattacttcctaaaaaaacaaacgtttcgtcaaatatttcttatttttgctcgggaaaacaaagatattctttcaaaatacagactaaataccaatgaaacgaatcatactcatcaccggaggagcacgttccggcaaaagcacctatgcggaaaagctggcactcgagctctctcccactcccgtttatcttgccacggcacgcatctgggacgaagaattccgccagagggtaatccggcatcaggaacgccggggaccggaatggacaaacatcgaagaggagaaagaactcagccgccaccggctggagggacggatcgtcctgatagactgcatcaccttatggtgtaccaactttttcttcgacctgcattcagataccgaccgggcacttgccgcagtaaaggcagagttcgaccgcttcacggcacaagacgcaaccttcatctttgtaaccaatgaaataggtatgggaggaacttccgagaacgaactgcaacgaaagttcacggacatgcaaggctggatgaaccaatatgtagccgcccgtgccgacgaagtgatactgatggtatccggcatcccacttaccgtaaaaaacactcattcataaaacaacagacaattaaaattcaacagactgatgaaaacatttcatatcacccgtccggacgagtcaatccgtcccgcattgattgacaaaatcaacaacctgaccaaacccaaaggttcattgggcattttagaagaactggcactccaaatcggactcatacaacagacattatcccccgccttgaaacatccgcaaaacattatcttcgccgccgaccacggcattgtagaagaaggtgtcagtctgtctccaaaggaaatcacctggcagcaaatcagcaacttccttcatggaggggcaggtgtcaattttctctgccggcagcacggctttaccctgaaaatagtagatgcaggagtagactacgacctcccctacgagaaaggcatcatcaatatgaaagtacgtaaaagcacccggagttatctgcacgaggcagccatgacggaagaggaaatggagatgtgcctggaacggggtgccgaggtggtgcgccaatgccatgaagaaggcagcaatgtcctcagcttcggtgaaatgggtatcggaaacacctcttcatcctccctgtggatgacctgctttaccggcattcctctggaacaatgtgtcggcgcaggcagcggactcgacagcgcgggcatccgccacaaatacgaagtgctgaaacagtctatggagaattacaaaggcgacggctctccccggaacatcatccgctactttggtggactggaaatggtaatggccataggcgccatgctgcaagctgccgagctgaggatgattatccttgttgacggattcatcatgaccaactgcctgcttgccgccgccaggctctacccggaagtgacggattacgccatcttcggacactgcggagacgagtcgggccacaaactggtgctcgacgccctgcatgcccgtccgctgctgaatctggggctgcgtttgggagaaggaacaggggccatctgtgcatatcccattgtcgactcggccgtgcggatgctcaatgaaatggataactttgcacatgcctccatcactaaatacttttaacatgaacaatgtcttggctgcattcataatgctcacccgactgcccttctggaaaatcaaggaagtgccggcagagtgtttcaagcatgtggttccctattggccgcttgtaggctggctgacgggaggcgtgatggcagcagtgctgtggcttgccggacagattatgccggtgtcattggcatggattcttgccctcatcgcacgcctgcttgtcaccggttgcctgcacgaagacgggctggcggacttccttgacggctttggcggcggcaccacccgcgaacggactcttgccatcatgaaggattcccacatcggaagctacggtgtcatcggattgatatgctatttcctgctgttgctccaacttcatcacctgccactgggacttctctgcatccttgtgctcagtggtgactgctggtccaagttctgtgcctcccagattgtcaactacctgccctatgcccggaaagaggaagacagtaaaagcaagaccgtctacaaccgcatgagctggcacgagttactggccggatttctttgtggcctgcttcctttcgtactgctgctgcctataaagctgtggattgccaccctcttcccactgctcaccttcttcctgctgtaccgattgatgaagcggcgcctacaaggatatacgggggactgctgcggggccactttcctgctatgcgaactgtccttctacttgggaagccttattctaattataaattaacaactgaaaattaaagatggaagtaatactcattcgacacacttcggtagatgtccctccgggcgtatgctacggacagaccgatgttcccctgaaacctacgtttgaagcggaagccgccgtaacagcagaaaacctgaagacataccttccgttcgatcacgtctacaccagtcccctaacccgctgcgtgcgcctcgccacctattgcggctatcccgatgcagaacgggacaaacggattatggaaatcaattttggcgactgggagatgaagccgttcgagcagaatgaggacccacgcctgcaggaatggtatgtcgactacatgaacgtggcagctaccggtggagaatcttttgctatgcaataccggcgtgtcagccagtttttggacgaattaaagaagaagccctatacacgcgttgccatcttcgcacacggaggcgtattaatctgcgcacaactctatgccggaatcctcaaagccgaagaagccttcgacgcattgacgccctacggcggcatcgtccgcatcaatctcgacaaggaatagtgaacgaaatagtagggccttcctccgcttcggtttgcaccttgtagatacctccaaaataatgaataaaatgggcattgatttcatggcgaatcaagctcgttttattctcaaaatgtacctttgcaaacggggcgttgaccacgtcgaaataaaggagcggtttactccggtcgcgtctgatgcggataatccctcataacgggcagtgtcattctctgacggagtcagcaggctgacaagcaatgtatcgaaccacctccggtccgtccttgcaagctgttccttgagatcggtctgcaggctgacagacacagtgctctccccacgaccgttcactttatccagcacctcactgcacaactgaataatgtcacactcctcgtcctcatactgaatcttgccggactccaagcgggataactccagaatgctgttgacataattcagcagactttccgcattggtctgaatcatctgtccgtactccctcttagtctctttatccagctcctctttcccggtcagcaattcggcaaagcccaccaccacattcagcggagtacgtatatcatggctgatttccgatttcagacgttccttcgcgatgttgtccgtctctgcctgcaaagcggcttcagccgtcttcttctctacgacagcaatctttccggagacatagcgcgtatacagatagaaaagcagcatcagcagcagacagacgcccaggagtataaatcctatacggtaattcatgtcctgaatcttctgcttctccaacagcagctcgtcaatgtggtaaatctccttcacctgcttcaactggttggccgagaaggcattgttcagcgaatcctgcttgcgtatgaggtagcgccgggtctcgatggccccgtcaatgtcccccttgtcatattgcgtactcgccttgtagtttatcaaagtggcaaaggtggagacgtagttgttcagtaccgtaggggtcacctcgtctatcaatgcgatgcttttgtcatactcatcggtcttggcatagtattgaagctgtatcaactggacattcagccagaagacgggatctacatgcggttcaagcagtttctttactttctcgatatgctcgtgcgccactgtaaagttcttctggttcatgtagtgcaggatatacttcacttcgcagtcaatctcgaaattgctccagttcttccgtgtctcgggttctttggaaataaccgtctgcaacgtcatgtccatttcatgcaaatagggcagcttcaggctgtctttaccgccattgccgtatacctgggcaatacgcgacagtatatccactttcaggctggtctttgtctggggagagaaattccggtaagcctccaagaaagcgtccagtgcctcattcgggcggctggacactccgtaggcacaccccagactgttatacgccgctatcatcccgttattgctatggcggagttttgattcctccaacgtctccttagccacatacaccgctttctctatctgtctcttggaagccagggcgcggctgatggcagccttctgctccagataataatcgtaagtgcctacctgggagacaaaatccttcagcacatccacccaatacgacagactgtccgggtcgtgtttcttgtcataacatgccgccagatagtaagcgcccatattctcatagaaagcgttcttctgccgccgcgcctcctcgtacaaacgggtggaaaaagtcatgttatagggagcatactggtgcttgtaggccatgtcacggagatacgtcagccggacaagggtggccggcagggtatcggcaaccttcaggatgctgtcctgataccggacagcccccgtgtcttctgccagcagcggacagatatatccgcaaaacaaaacatggatgagaatcagtattcgtttcattgcgccgttcctccgtgtaatgcgggattatacttcaaaggatgcgtaaaacagaaacgcgcgccacgggtgtacccactgtccacccacagcttgccgttcatatatttcacaatcagttggcagatggaaaggcccagtccgcttccctgcacaaaatcattcagcttttcaaagcgttcaaaaatcaagtgctgcttctccggtggaatgccgcatccggtatccgtcacggagaaaagtgccgtaccggcatcagccatcttcagttccagcacgatggagccttgttccgtaaacttggtggcattcaccagcaggtttatcaagacttggcggaggcgcgcatcgtccgtatccagcatcaggacggacaaatccgtgtcaaaacgcatttcaacctccagcttgcgcgaggccatcacggtctccacgacctcattacacaacttcacggcatcatgcgtgcggatgttgaaggttatattgtcattctcgaaatccgagaaatccagaatgtcattgataagtttcagcaactgaaaggaattcaccttgataatttcggagaactcccggcgcgattcgtcatcgaacgactcgtcctcatccgtcagtaccgccgagaatccgacaatggcattcagcggcgtacgtacctcatggctcatgttcgaaagaaacatattcttccgttgtatggcttgcaccgctttctccttcatcgcctcctgccgcatctgggaacgcttcaaacggaatatcttcttccagcccagcaccaggaggaatatcagaaacagtacggacacaatgatgcctgccagatagaaacgcatggatacaatgcggtcgcgttcgttctggtaggccagttggtcggcctggaaacgggtacagagccggtctatctccttgggatagttcttctcgaacgaagtcttgatatacgaaaagaccttgccgtactgtccgtaggcttcttccttgttccccatcttcaccagtaaatccgccttttcgagcagagcttccttgtagatgttatggtttatccgggcatattcggtttgaaggaaatcattgtaggcggtcaaggctgcctcatgctctccggtggccaccagataacgggcatctataatcagaaggtattgccgtatctccggaatcagttgcgcttcaagctggcctatctgtaccagacaatggctggcagctttcaagtcacccttgaataattggcaggaagcattggagatgtgacgcatggccagctccagcggagaaagccggtcttccggatagaggttcagacgtgcaagataacgcgaggcaccgtttacattccgtatgcgcaggttataatctatcagttccaccagtagcatgcggatatgcacatcctccccgtccatcccatccagcagtctcaaagactcttcgtaagcggcaccggcttcccgaagcctgccggtatagctgtacacctctcccatggcattcagcgccagggcattgccgaaggggtaggcaagcgcgcgggctttggagtacatctggtcgctctgggcaatggccatacggatttctccacggaaaagggaggattttataagtattctttccagttcgaaataggtgtaatagcgctgggattcatccaattgggacaaaaggccgtcggcattcagcgagtcacactcctcccgggtcagatagtcgaaaccgaggctgttgtgaaaagtggagatgacctcatggactatactttccttttctttagtccaagaatccgctttatctgttgccgatgcaattattgtgctcccgaaccaaataaagaaaaggaatatatatagttgctttatcctcatttataagactttgtctgctttaaaagttacatttttaatgcaacgcggtcttgcaaagatattatatctttttggaacggacaaagaatcagttaaaataacaacattttaaaaacaaaaggaagccaaggtcgatgtcactattacggcaaccaccatccaccactccacacgccggttgatgcggacagccacacgcatatcttctgtcttcagaggccgttcattagaaccgatataaggtttccatacctcctcgccgaaatagttgtgcggacctccgaaacggcagtccagaataccggcaagggcggcttccggataaccggaattgggactggcatgctggctgccatatctgcccacaaaagcaaacaaggaaaggcgaccggaaaccagtaccatcagaaaggctgtcagacgggcgggaatataattggcaacatcatccaaacgggcagcaaaacagccgaaccgacgatagcgttcattcttgtagccgaccatggaatccagcgtgttcaccatcttataggcaagcatgcccggaactcccaacagcagataccagaacaagggggcaactaccccgtcactcaaattctctgccaaagtctccaatgccgcggttctcacctcctgcgccgagagtgcagacgtatcacgccctacgatacgtgccacttgcatcctcccttcctccaaggaacggtccaccgccttgaacaccatacgcacctcgcgaaccagcgtagtgcccgccaagcaatagaatatcagcaatatttgcagcgttagaagcatgcccggagaaaagagtgccgccaagcggagcaacaaaagcgtaatgacgtatacccccaagacaagagacaccgccacaaacgcacctttcagaaaacgcaaatcgccccggttcaaccggtgctcacagaaagaaatggctttgccgaaagccaccaccggatggggtagccacgccgggtcgcccagccagtggtcgagcagccaggctgtgagaagcggcaggttcaagttgaaggcgacacccaaaagtataagtacatcttcttccatcggttattcctcctcaagccattgtcctattgcttttacaagcctgtcattctcctcccggctctgggcggctatgcggaagaagtgctcattcagcccgtcaaagttggaggcgtcccgaatcaagatgccatgctccccggccagatagtctttcaaggcggaagccttgcccatacggaggcacaccagcatgaaatgggtttcggtggcccatacctccagtcctcccaatgcctcgagcgcactgcgcaggcgggcagcctcttgcaagtaagacgccacatccagcggattgggaacatcatgttccaacagatggagtcccgcctcaatggcaagctgattgaccgaccagggcatacggttggtacgcaagcggtgcagcaggtggggggcgccggtgacatatcccagtcgcagaccgggaacggcataacgcttggtcatggagtgcagcagcagaacgttgggaaattccgccgcctcggcagcagagaaaagcggacgcaaggtgaaaaactcgtaagactggtcgatgacgaaacatacctgcggattatgactgataagtgttgccagatattccttctccacgaccgttccagtagggttgttgggattgcacagccacagcatgcgcacctcttccggcaagcgatacccctcgctctccgcaggaagccgatagagggaagtgacccgatggccgtgcatgcggcaggcatcggcatattcactgaaagtgggctgcacaatggcggtgtttgtcccgcggaaagtctgcgcggtgagataaatggcttcggtagctccgttcgtcacgcacactgcctcggcaggaagacggtggcagcgggcaaggcaggcctcaagcgtgtaaggctccggttcgggatagttgccgatgccgtcaatccgggcacacagatgcgccttcaaggcagagaggtctaccctgttgtaaacgttcgagctgaagtttgccgtaatgggacggctgtatttataggaatcgtctccgtgtccttcaatcatggttctttgtcaatatttggtagataagcggcaggttgacgtggcggcgcacgtgctcggcaagcctatcgtattgttcttctttgaatgtatggtaatcgaaagcgccggcattcccggacagtttgtctgcaaaaggcgcaagcaggaaatctatgaattccggattgtcgagaatgccatgaatataagtccccatgcaggtggagtccacgtagtatccgtcggtagagccgttctccaaaagattcaggggagaatcgggagtaccttccacgggggtggtcactcccatatggatttcatagccctgcatgaatggagaatggagagtggaagatggagaatggggattgcacagaccgaacttcacctgacgggtcaccttctctcccgacatgcgggtactgatgggcaacagccccagtccgggcaggcgttcgatgtccccctccacatgctcagggtcgagcacctcctgccccatcatctgatagccgccgcagatacccatcacggtggcaccttcacggtgggcacggatgatggcagccgccacaccgttacggcgcaattcgtaaaggtcatcaagcgtgctcttggagccgggcagcaggatgacgtcggcctttgccagctcatccacattgttggtatagaacagatgtacgcgcgggtcacgctccagcacattgaaatcggtgaagttactgaggtggcgcagcaggatgacggcgatgttcacctttcccttctcggcacggacagactttgcggcaagcgccacggagtcttcttcttcaatgtagatatcacggtagtaaggcaccaccccgacaacgggaatgccgcaaagctcctccagcatcgtaatgcccgactcgaagagacgtatatccccccggaacttgttgataagaattcctttaattcgctcccgctcatggggacgaagcaacatcagcgaaccgtagacgctggcaaacacaccgccacgatcaatgtcgcccacaagaattacatcggctccggcatgcagggccatcggcagattgacaaggtcggtatcccgcagattgatttcggagatgcttcccgcgccttccagcacaacgggattatagcgggcggcaaggcggtcgtaggcagcacaaacctcccagcgcagttcgtcgcgtccttccttgcggaaataatcataagcattgcggttgccgataggacgcccgttaagaacaacctgcgaggtatggtccgactgtggtttcagcagcagcggattcatgtccgtgtggcaaggcactccggcggcttctgcttgcacagcctgggcacggcctatctccagcccttcgggagtggcaaatgaattgagcgccatattctgtgccttgaacggtgcgggctgatagccgtcctgcttgaagatacggcagaaggcggcagcaatgatgctctttcccacatcactacccgtcccggcaaacataatcggatgaagtttctccataaattctattttagcgaatgcaaagatagtgcaaatccgaatatctctcccattcataagccatatcttcggaaactattcgttatatttgtaacgttctattcaaaaagatgactactgaacaattcccacctcctcttgtttagagaaacaagaacccctaaaccgaacgaacttatgaataatctatcatgccggagattttttccggttgctgcctgcgtgctgcttgccatcggtgaagtggctgcacaaacctcccttccccttagcttcggtgatgccctaaggcagatgcaaaacggcaaccgcagcctgaaaatagctgacaagggaattgaagccgcccgtgcggaacgtgacaaactgaatgccctctggtaccccttcctgcaaggtgccggtacgttcgtgcatctttccgaaaagatagaggtaaaacagcccctttcccagttcaccgacccggcaaaggactttgtgcacaacatcgtgccggacgaccaattcatcagcagcatactcgaccagataggctcccatacccttgcctttccactggctccacgcaacctgacttccgtcggcctgaccgccgaatgggtcgtattctccggcggcaagcgcatccgggcctcgaagataggcaacaccatgatagacattgcccgcgaaaaccggggacagaccgatgccacgcaacgcaccctgctggcagaaagctacttcgggctgaaacttgcgcaagaggtagtacgcgtgcggcaggagacttacaacagtctgcaacgccattaccagaatgcccttaaactggaagctgccggcatgatagacaaggcaggccggctctttgcccaagtgaatatggatgaagctgcccgttcactggaggctgcccggaaggaggcctccgtcgtgcaaagtgccctgcgcaccctgctcaacctgcaagacacatgcagcatccatcctacttcggagcttttcatcaacgaccaactgcccgccaaagaggagttcctgcaagccatgcgggtggagaactacaccgtgaaccaactgcaactgcagtcacagattgcccgccagcagctccgcatcgaccagagcggctacctgccggacatcgccgtattcggcaagcagaccctctatgcccacggcatacagagcaacctcgtcccccgcaccatcgtaggcgtgggcttcacctggaacctgttcgacggactggcgcgtgagaagcgcatccgccagtcgaagatagcccagcagacccttgccctgggacaagaaaaagccaaagaagacctgagcgtaggcatcgacaagctctacacccaactgcaaaaggcacaagacaacgtacgcgccttgaataccaccatcgagctgagcgaagagctggtgcgaatccgcaagaaatcctttgccgaaggcatggcaaccagtaccgaggtcgtagatgcggaaacgatgctggcaaccgtccgcgtggcgcgtctggcagcctactacgaatatgatgtggcactgatgaacctgctggctatctgcggaacgccggaacggttcgagaaatatttcgagacaacttattaaaacctaccctttatgaaaatcaataataaaagcatcagcattgcattcgtcattatcctggctgcaacggtcatcatttcacttgccggcatgttactcatgagccggcagcccctggtcctgcaaggacaagtggaagcaacggaaatacgtatcagcggaaagctacccggacgtgtggactccttcctcgtacaagagggcgactgggtgaaggcaggcgatacgcttgtcgtcatcaacagccccaccatcgaagccaaataccgccaggtgaatgccctggagcaggtggcccaggagcagaacaagaagatagacgccggtacccgccgccagattgtggccaccgcccggcaactctggaacaagacgcagagcgaccttgccctcgccaagaccacttaccagcgcattgtaacgctttataaggacagtgtcgtcacctcccagcggcgtgacgaggtggaagccatgtacaaagccgcccaagccgccgaacgtgccgcctacgagcaataccagatggccgtagacggagcgcagagcgaggaccgcgcctcggcccgcagcctggtggaagcggcgcgaagcaccgtcgatgaagtctcctccctcctcgtcgactcccgcctgactgctcccgaagacggccagatagccaccatcttccccaaacgcggagagctggtggcccccggcactcccatcatgagccttgtcgtgatggacgatgcacacgtggtactgaacatacgcgaggacctgatgccgcagttcaagatgggaggcactttccgtgccgatgtccccgccatcgacggcaaggacattgaattccgcatctattacatcagtccgctgggcagcttcgccacctggaaatccaccaaacagacgggcagctatgacatgcagacgttcgagatacacgcacgtcccacacagcaggtagagggattgagaccggggatgtccgtacttttaaaaatgaagaatgaaaaatgaaagataaagaatttggctgcgcaatgaaagcgcttcgcatggttatccgtcgcgaatggcaccgcatgacctcccgccgtctatacctcggcgtctgcgtcgtgctacccttactctgtctgttcttcatggccaccatctttggaaacggacagatggagaacattcccgtgggtatcgtcgacctggacaacactgccacttcgcgcaatatctcccggcgcatctctgccgcccccaccttccgtgtgacggagcacttcaccgacgaagccgacgcccgccgggcattgcaacagaaggacatatacggctacctcgtcatcccgccccgcttcgaacagaaggcggtgacgggaactggcgcaacgctcacctattattaccactatgcccttctttcggtaggcagcgagctgatggcggcgttcgagaatacgcttgcccccgtggcgctctcgcccatcgtgatgcaggccgaagctctgggagtcagcggagaacagatacagacctttctgctccccgtagaagccagtacccatcccctctacaatccggacatggactactccatctacctgagccagcctttctttttcgtactgttccagatactcatcctgctcaccaccgtttactccataggcggcgaactgaagttcggcagtgccggcgaatggctgaagacggcacggggcaatatcctcactgccgtagcagggaaactgctgccctataccctcatcttctcgtccatcggtatcctggcaaactatgtactgttcggcccgctacatatccccttcgctggcagtctgtggctgatgaatgcagtgaccgtactcttcatcatcgctacccaggcattggcggtctttatctattcggcctttcccaagattgcctatatcatcagtgtagtgtccatggtggggtcattgggggctacgctgtccggagtcacgtttcccgttacagccatgtatgcgcccgtgcatgcggcctcctacctcttccccgtgcggcacttcacggaggcggcacaagccatgatttacttcgatgcagggtttgcctacttctggcagtcggtagctacactcttcatcttcctactggcggcactgctgatactgccattgctgaaatggtggataaaaaaagagataagggaagaagcaatctccgcctccccatcaccttgcccacctgccgcattgtcaacagcttccattatccgccacgagtggcatgccatcgccaccaatcccgccatcctgctcgtgctggcaggcggtatcttcctctacggactgctctacaactacatgtacgcccccaacctggtgcgcaaggctcccgtcgcagtggtagacctctcccactccgccctcagccgcgaatacatccgactgctcgacgccactccccagaccgccgtctacggccagacacccaacatcctcgaagcccgccaatggatgaagcagggcgacgtggcaggcatcctttacctgcctgccgacttcgaggcacgtgtggcacggggcgagacttcggtcttcgtactctatgccgccacggacgctttcctcaacttcaaaggactgcaagaatccagtgcgcgcgtcatgcttgccgtgaacgatgcccaccgcatggagggcaccgtattcctacctccgcaaggactgctggcagtggcttcgtccgctcccgtcagcgtgtccggcacggcgctctacaactatacagagggctacggttcctatctgattcccgccgtcctaattgtcatcatcttccagacgatgctgatggtgattgccatgctgacgggcgaggaagcggaagcccgaagaaaaggaatacggctgatgcgtgccgactcattgaaggatacattacggattgtcggaggcaggaccttcgtatacttcatgctctacgtggtgttttccctattcctgctgggactgttgccgcacctgttcagcatcccacacatcggcagcggaggagacatcgtcacaatgatgatacccttcctgctgggcacgagtttccttgccctggccgtctcccgctggtttacagactccgaagcgccgttgctgatgatagccttcttctctgtgggctatatcttcctttcgggcgtgtcctatccgctggagctgatgccgtggtattggcagacagcccactatctgtttccggcaggtcctgccgtacttgcttttgtaaaactgaattcaatgggtggaacgctggccgacgtatggccgcagatgctgacgatgtggatacaagtattggtctatggaactttggcgctctgcactacacgccacctctacggaaaaggaaaagtgaaggcataaaaaaaggctatctatcccagacagccaatcttttgttaaccttaaatctaatactatgaaaaacacattgcaaatgtacggacttccccgaaatatccaaaatttctgtccatgacggtctcatttataacatggtttaataggaatatgccgttgttaacagatagaggctggtcaaataagaaattttcactatcttcatccccaaaatcgaacatcataactaaagaatattttgccatgattcataccatactcgatacagacctttacaaattcaccacctcgtatgcctacatcaaattgtttccctatgccatgggcactttcagcttcaaggacagagacgacaccgcctatacggacacgtttctgaaggaactgcaagaggcggtggacagcctggcacagaccgtacttactgccgaagagctggaatacatgacccgccactgccgtttcctgccgagggtctattgggagtggctctcctccttccgcttccagccggagaaggtaagcatccatctggacgaggaccggcacctgaacattgaaatcacggactatctgtacaaggccaccctttacgaagtccccctgctttccatcgtatccgaaataaagaaccgttctttgggaaacgtggccgacatggacggcatactctgcaaactgtccgaaaaggtggcactctccaaccgacaccagctgtatttttcggagttcggcacccggagacgcttctcgttcgaggtacaggacaaagtcatagaccgtctgaaggaagccgccgaatactgtaccgggacttccaactgccacttcgccatgaaatacggcatgaagcctatggggacgcatccgcatgaatggttcatgttccacggcgcacagttcggctacaaacacgccaactatatggccttggaaaactgggtgaacgtgtacgacggtgacttgggcatcgcactgtccgatacctatacctccggcattttcttaagtaacctgagccgcaagcaggccaaactattcgacggtgtacgctgcgactccggcgatgaattcgacttcaccgacaaacttgttgcccgctaccgcgaactgggcatcgaccctaccactaaaaccatcgtcttcagcaatgcgctcgactttggcaaggcactcgacatccaggagcattgcaggggcaaaatccgctgctccttcggcatcggcaccaatctgacgaatgataccggattcaagccctccaacatcgtaatgaaactgacgcaatgcaagatgaacgtcaaccaggaatggcgcgaatgcgtgaagctgtccgacgatgcaggaaagcatatcggcagcgaagcggaagtacgggcatgtctgtatgatttaaggctcggacagcaaatagaacccctatgctgaaaacagcttcccggcggttagcgataagtgcttactgtcttttccttttgtaggcaaactcttgccatttctcctccggccagtcctgccgctgcatctccatgcgggccatgacgaagaacaagtccgaaaggcggttgatgaagcgcagaatatcctcgttcacggggtcttggcgatggagtgtccacaaacggcgttcggcacggcgggccacggtacgggcaaactgcagttgggctgatatgggagtgccaccaggcaaaaggaagtagccgttgtccgtcagcaggacggtcatggcatccatctcctgctcacagcgcagcgtgagctctgcggcagaaagcggattagggttcaccactcccgagggagtggccacatggctcattaccaccatcagttcccgctggacagcatgcagcaactcctgccaggcatcttttgccgccagcatggagcgcacgataccaatcacggcattcaattcatcaagacatccgtttgcctcgatacggatgtcatctttcggcacacgcgcgccaccatgaatacccgttgttcctttgtctccagttttggtatagactcttttcatactctatttgataaatcagtagggtcttccaaagaagacaagcgataagtattcagtttcataatcataatatatttaaatgaaaacaaagatactccactatttcaagaacacaaacgaaattacataaaatatcaatgcgctattttagagttcaccgaacaaagccatcacatccacctcgccccaatacagatgcgtataactggctatcaggttcttatagcgaaagacgggagtggttaccttctctcctttggcattgtaaacctgcgctatcgagggaggaagactgcacgcaccaccttcttttccatcagtttcgggcacggcaaactgcgtataatggaattcgtgtcctttaagccgccatccgttatagtcgaaccggcggtatcccaatgtcagtttcctgcgtttacgctcgtttgtaacgctgaaaggtaatactcctaccatctcatttctgatattgcctacactgctcccggcgtttcttccatcgcttccgctgcttctcccgccatctccggcgattcttccatcggtatcaaaacttcccccgtccatatccccatcagaaagaacggactgcgaaagatatatcatccccccgcattccgccagcgtcctgccaccggcctctatatagctgcggatagactccctggcaagccttgccccggcaagttcctccagacggttctcgggatagccgccgggcagatagagcaaatccgtctcttgcggaacagcccggtcctgctccggattgaagaaagtgaccgtgcccatacagcgcagaatatccagatgctccgcatagaggaaggaaaaggactcttcgttgcgcgctaccgagatatgcagcttccccggctctgatagtaccgacttctcctccacagccgccgcaggcaatggaagcccgattgtcgagagtagcagttcccagtccacatgttcctccagcaagcctgccagcatgtccagcccctccgtctccttagaacggctgaaatccagccccagatggcgtgactcctgctccagttccttccgtttgggcagatagcccagacaagtcacgttcaagtcttcacagacctcctgcagcatccggtagtggtggggtgagccgacacgattgaagataactcccgcaatacgtatatccggacggaaattgatgaaccccgacaacaaaggagccatggaataggcagccgacttggcatcgaccaccagcaccacaggaatacccaagagccgtgccacttctgccgacgagccccggtcgcggtcgtacccgtcgtacatccccatcatcccctcgaccacggcaacatcagcatctgccgaatagcgtgcatacagactgcggacatgctccggagatgccatgaaagtatccagattgatggaaggacggccacataccgcctcgtgaaacttagtatctatataatcgggaccgcacttgaaaggctgcaccttcagacctttcttcacaaacaatgccatcagtccacgactgacggtggtctttccactgcccgatgtaggggcggctatgagaaactgaggaatggaatccattatgaagctatcaaattaaatattttcctcctgcaaaggtaagcatatctccgacaaaagttttatcttagctgcgaaaataaaacataccaccatgataaccgaagaacttaagaaactctacatcgcacataccggacacgaaccggaacagattgacgaactcccctcctccggctccaaccgccgttacttccgcctcatcggaagtcctacacttatcggcgtcagcggagagtctgtggaggagaaccgcgccttcctctacatggcagaacatttccgccagaaaggactgcccgtaccgcaagtgttcatccgctccgaagatgatatctattatctgcaagaagacctgggcgactcgctcctattcaatgccatcgagaaaggccgcaagaccagcgtattcggcgaggatgagaagcagttgctgcgcaagaccatccgtctgctgcccgccgtacagtttgccggagccgacggcatggacttctcctactgctacccgcaggcagagttcaacagccgcagcattctgtgggacttgaactactttaaatactgcttcctcaaggctacggggatggacttccaggaagaccggctggaagacgacttccagaagatggcagacgtgttactccgtagcagctccgccaccttcatgtaccgcgacttccagagccgtaacgtcatgataaaggacgacgagccgtggctcatcgacttccagggcggacgcaaaggtccggtctactacgacgttgcctccttcttgtggcaagccaaagcaaactatcccgacagcctgcgcaaagagttgctgaaggaatacatcgacgccctgcgcaagtaccagcccgtggacgaggcttatttctatgcccagcttcgccacttcgtattgttccgcaccatgcaggtgctgggtgcctatggtttccgcggttacttcgagaagaagccccacttcatacaaagtgtccccttcgccatcgagaacctgcgccagctgctccaagagccttaccccgaatatccctacctctgccggattctgcgcgaacttaccgagctgaaacagtttacagacgacctgcaaaagcgccgcctcgtggtgaaagtcaccagctttgcctacaaaaaaggtatccccgaagattccacgggcaacggaggaggtttcgtctttgactgccgcgctgtgaacaaccccggcaagtacgagcgttacaaacccttcacgggactggacgaacccgttatccgcttcctggaagacgacggcgagatagccgtattcctggagcatgcctacgcccttgtcgacgcttccgtgaagcgctacatggaacgcggcttcaccaatctgtctgtctgcttcggctgcaccggcggacagcaccgctccgtgtactcggcacaacacttggcggaacatctgcacaagaagttcggcgtgcaagtgaacctgatacatagagaacagaatattgaacagacgtttaaggccaaagtttaatgtgctaatgtgagaatatgccaatatgaaagccatgattttcgccgccggcctgggcacccggttgcgccccttgacggaccacatgcccaaggccctcgttcccgtagcaggaaagcccatgctggaacgggtgatactgcggttgaaggaagcaggattcaacgagataatggtcaatatccaccacttcggggagcagattatcgacttcctccgtgcccacgacaacttcggcacggagattcacatcagcgacgaacgcggcatgctgctcgacaccggaggaggcatcaaaaaggcacgcccctttctggacggacaagaaccttttctggtgcacaacgcggatattctgacggatattgaccttgcaggtctctatcgccaccatctggagagcgatgcggagtctaccctgcttgtgagcgagcgcaagacttcccgctatctcctttttgacgacgactaccacctgcacggctggataaacaagtccaccggagaggtgaaaccggcaggcttcgactaccgggaaacgaagtaccgggaactcgccttcggaggaatccatgtcatctccccctccctcttccgcctgatggacgatgggcagtgggacggcaagttctccatcattcctttctacttgtccgcctgcacaaaggtgcacatacaaggctatccgctgcaaggattccgctggttcgacatcggcaaaccggagacactggcacaagcggaggaatactacaaacaaaaataacaagtaatgtaaagcagcctaacattacttgttagctctctttacattacttgttatcaaatcaacctatgtaccatagattatctatggtgaaactacgccagtgccagtatcagcaactgagccgtcagcacccgcaggaacatagccagcggatagaccgtggcgtatcccaccgcaggggcatcgcaggatgtcaagtccgaggaataggccaatgcaggtggattggtgttagctccggacagcacacctatcagcgtatagtagttcagcttccagaaatagcgccccatgaatcctgtcaccagcaacggaacgaccgtgatgatggccccatagccaatccacacatagccgccttcgtagataatggtatcgatgaatccctttcctgcacccaaccccacgcaggccaggaacaaggcgataccgatttcgcgtatcatcagattggcactcatcgtcgtgtaggttatcagcttatattgaggcccgaaacggctgatgaggatggaaaccaccaacggtccaccggccagtcccagtttcacgggttggggaatgccggggaacatgaacggcagactgcccaagatacatcccagggcaatacccaggaagataggaatcaagttgggatggttgagacgcttcagcgagttacccagcaccttctccgcatgactcacggcaagctcactgcctacaatcgtcacacggtctcccatctgcaactgcaagtggggagttgccaccagatccacgcccgaacggttgatacgggtgatgcaggcaccgaagttgttacgtatcttgagctgagacagagacttgccgttcagttccggcttggtgatgaggatgcggcgtgaaatcaagttcttgtcctcccgttcccactccaccgaaatttttcttccgaagaaggcaacaatggcctccacatctttcgggttggcaatgaacagaatttcatcctgcatgtgcagcaccgtatcggcattcgccagttctgtttcctgactgccggtgtgccggatgcgggagatgacaaacgcacggttcaacaatggtttcacatctctgatccgcttgccgtctattgcctcattgcgtatctctaccgatatgggacgcacggtcagctcctgcagatgacccagcccgtgctcggcatcctcctcttctttttgggtattaatccgcatgaaaatcttcaaggctagcagcgccaggatgcagcccaccacacccagcggataggcaacggcatatccgagtgcgatttccggagcatccaccccgttgaggtcactgtttgcctgctgggcagcacccagaccgggggtattggtcacggctccggacaagatacccaccatcgtagtaatggggattccggtggcaaagtgcaacacaatggtgataaccacgctgaggaagacggaaagcattgctaccatgttcagcgtaagtccgcccttcttgaaagcggagaagaatcccggtcccacttgcagaccgatggaatagacaaacagtatcaagccgaactccttcaggaagtgcagcagatgttcgtcgaggttcatgtcgaaatgtccgaagacaatgcccacaaacaaaatccaggtgacacccagcgagatacccgccaccttcaacttgcccagcatgataccgaaggtgatgaccagggacagaatcaggacagagtgtgccactcctccgccccaaagattgggataaccctcaaagaggtttcttaatagttccatagtttctatctttagtttttacttttcagccttattgtttaattcttaattctctatttaaaaagtgtatccccacagaaatcacttctccggggatacgcatttcacacataaaaaataactactattataaaggcatgttgccgtgctttttcggtggattgctctgattcttgttgtgcgccatctccaatgcctgcaccagcttgtagcgggtatcgcgcggcatgatgacctcgtctatgaggccacgctcggcagcgcggtaagggttggagaacttgctttcgtactccttgataatctcctgcttctcttcggcagaggacttacggtagaggatgttcaccgcaccctcggcacccatcacggcgatttccgcctgcggataagccaggttcacgtcggcacccgtcggtttgctggacatcacgatgtaggcgccgccgtatgccttgcgggtaatcagcgttatcttgggcacggtggcctcggcataggcatagacaatcttggcgccgtggcggatgatgccgttgtgctcctgcatcgttccgggcaagaagccgggaacatcttcgaaggttatcagcgggatgttgaagcagtcgcagaaacgaatgaaacgtgccgccttgtcgctggcatcaatatcgagcacacctgccaaataggcaggttggtttgccacgatacctaccgaacgcccgttcaggcgaccgaaaccgataacgacgttcttggcaaagtgaggcatcacttcgaagaagtactggttgtccagcaccggttctataatatccttgatgtcatagggcatgttcgggtcctcaggaatgacggtctgaagcgcctctacccggcgatggatatcgtcggagcagggagtgaagggagcatcctccatattgttggacggcaggaagctcagcagctcgcggatgctcatcagtgtctcctcctccgtattgcacatgaagtgggtaacgccgctcttgctgctatgcgtataggcaccgcccagttcctccttgtccacctcctcgtgggtcacggtctttaccacgtccggaccggtgataaacatgtggctctgctcctttaccatgaagataaagtcggtaagcgccggagagtagcatgccccaccggcacacggacccagaatagcggatatctgcggaatgacacccgacgcaatggtgttctgatagaagatggaggcatagcctgccaagctgttcacaccttcctggatgcgtgcgccgcccgaatcgttgagggcaatgacgggagcaccgttcttcagagcaagctgctgcacctttacaatctttgcggcattcgtctcgctgagcgaaccgccatgcgccgtgaagtcgtaggcatagacaaatacaaggcggccgtctatctttccgtaaccggacaccatgccgtctccggcaatctgcttcttctccatgccgaagttggtgcaacggtggttcacgaacttgtccagctcattgaacgagcctttgtccagcagcatgtcaatacgttcgcgggcagtcatgcggccggaggcgtgttgtttctctatcttgtctacgcccccacccagcgaggcacgtttgtccagttcctcaaactggcggtatatttcttctctgttcatatttgcatttacaatttagtgatttataatatacggactgaatgcgactcgggattattcctcctttatcaactccaattcaatcaatacttggttggcatttaccggttcgccctcgcccacgaggatgttgcggacgatgcagtcggcatttaccttatagttactctgcatcttcatggcttccagcaccacggcaatgtctccggcagccagtcggtcgcccaccttgacggggatgctcactaccttgcccggcatcggcgccagaatcttgtcgccctgcttctcgtcggctcctttcttcatgtgcagatacttggcttgcgtgtccacgatgtccacatgaaaggaacgctggagcatgctgatgtcataactcttgccgccctcgccgcgcacaaggcctgcgttgaacgagtttccgttgtgcaggatggagcaacttccgttctctgccatcacaatgtccacttcgtagggctttccgtcaatggtaagttgtaccttattcccttccttacccaccagggtaatgtctgcgatacggtctcctatatgtatttccattattaattatccattatcaattatccattatcaattatccattccttaaatcctgagcactcccttctgcaagccaaattccctccaacggctgatggggcgggcatcgggtagctgtgccgaaacattctcctccagattaaccagatagtccatataggcagctatcatggctatgttctccaactcttcgttggcagtgttggtgcgtaccagcatgcgggcgttcttctcgataaagagggtgttgtactctcccttcacaaagtcgggcacgtgcatgatgcgcttcagataggcaaggttggtctttacgcccgtaatcttgtactcgtagagcacacagcgcatacgctcgatggcatactggcgggtggttgcccatacgatgagcttacctatcatagggtcgtagtagatgggaatctcatagccgtcgtacacatagctgtctatacgcacaccgattccgttcggctccgtcagttgcttgatgacaccgggagacggcatgaagttgttttccgtatcttcggcacagatgcggcactctatagcatggccgcgctggaacagttcctcctgcttgaggtgcagcacctcgtcgttagcaatgcggatttgctctttcaccaggtccacgcctaccacttcttccgtgatggggtgctctacttgcaagcgcgtattcatttcgaggaagtagaaccgacggttcttgtctaccagaaactcgatggtacctgcaccggagtagttcactgccttggctgcggcaaccgccttctctcccatctcccggcgcaattccggcgtaaggaagggtgacgggctttcttctaccaccttctgattgcgacgctgcacggagcattcgcggtcgaagaggtggatgacgttaccgtggttgtcgcccaatatctggaactcgatgtggtggggttcttccacgaacttttccagatagaccgtgtcgtctccaaaggaggacatggactcggagcgtgccgtgttgtaggcttccaccacttcgctctcgttatggataaggcgcatacctttaccaccgccacccatagacgccttcagcatcacggggtagcctatctcgttgcagatacgcacggcttcttcggcactctgcaaaggttgttccgttccgggaaccacgggtacgcctgccgcaatcattcgcttgcgggcagctatcttgtcgcccatcgcctccatcgtctcggcagcgggaccgataaagataatcccttcctccttgcaacggcgggcaaactctgaattctccgacaaaaagccgtaaccgggatgaatggcatcggcaccgcatcgctttgccgtggcaatcactttatctatattcaaataactctcttttgccacagccggtcctatcggataggcctcatcggcataagccacatgatgagaggtgcggtcagcctcggaaaagacggcaaccgtaagcagtcccatctcccggcacgaacgcatgacgcgcaaggcaatctcacctctgttggcaatcaatactttcttaatcattttactttttctttaatatataaagggtatattttgctattgctgaacgaacggcttacctcatccagacaatgcggacatatacaatcggaaaagttctgttgtagatacgcgcgctgttccgaagttaatcggactgatgcgcaatggcagtgtacaatatcatcgtgcatgcactcaaacgttgcaccacaatgcgaacatacctttagcataggcatccctttcttctttagaagttaaactaaaattttcgtactgtcttcctaatcccacgagcaaaggcagcctttaatgaatggcaggtcttctgactgactcctaatcctgaagccttcccgattgttcaacacatatcagtggcgagggtgtttttcatgatttaaaacggagtttcacagcagcgggactgtccgggatttgcacccgattcccttttaatccagatgatggaaacatgcatccggaaccaattcgtgggcaaagataatggaaaccggatgcaatgcaaaaaatcagactacatatttattggtattttcaaatttcccttcatatatcaacagatatctattgactgttaccgtctgaaacggtaagtaatatcttccatccttccctgctctatgcgatagagacgctggttggtatgctccgatttcaagccgccaaggctttcgacgtacggtcccaacttgatatactggaagtaccgtgtatccaatctttcgggaagctcctccttaccggagtaccagcctacctttacagcagggaacgcctgcccggaggaaatgaaccttgccaaccgttccacttccatcggttcggcatctccccccatgaagcagacgcaagttgccgcacttccatacttttggagaagtgcggaaaggctctcttccgtcagcaagtcgcccacatcctccatcagataggcactatggcagcctttgcaacgattgggacaattggatatattgatggcaagcgtcacctcgtccggtatctcttgaaatacgatgtcataatcagtgtaccggagcatagtatctttgtgcggcctccttctgccgtggctgagaaaagttgctgacacgcttcatgtagccgatgattcgagtcaaatagtccacattattgctatgacatttcgggcattccttcaagtaacgtttgtctatatgatgacagtcattgcagatggtgttcggaatgttgaaggtgaagtagttgcagccctcggtagcggctacccggagcagctgtcggtactgctctttgctcaaatgttcttccagattcatgtgcagtgcagagcctccggtcagatgctcgatgtagcggcgaccgtgcaggcggaatttgtccataatgttcagcgagctatcttccacaatgtagaagtagctgttgtagcagtcgcggaatgtctggaacccggcttccctatcccacttggcatgtttcacaccgacgttctcggcgggaatcatctcgcagttgaacagcaggtccttgctacggtatttcttgttgtacttctccacaatactcaatatctcctgcacgaaagcttcgtatttaggattatcattgatgtctatgcccatgaactgtgcagcttccaccagcccgttcacaccgatagtcagatactggcgtccgaggttgatgtatcccgcatcgaacagtggtagcatgcctttactctgcaactgtttcagattctcattataagccatctgcactttgtgcaccaggtctaccacttcttcaaggaagaaatgataaagcagccccgactttacagcgtgctggatgcagcggttgaggttgatggtaaggacactcttcgaaccggtagacacacctccggcacccaacgtataactgaatccattgtcttgaatttcattgcgcaagcggcagcagctgctcaaagaatcggcattgtcgctcatataggtaaagaaagaatggccttcggcatacatctccgccgtgaagtcaccgtattccttatccagtacatcaccgtctttcgtcagcaatgccatagtctctaccgggaaagtaagcacagttttagtgcgctccttattgaaccatttcatgaaacgtttctgcagccagctcaaggaattccaatcgggcttactgccatcgggaaacatgaaatgctcgaaaagactgttgaagtaatacttgtcatagtatgccacattccagaaaacggcttggaaatttcttgcgccggtaggctggttgatggagtagaccacttgctcgaagcagtccgtgattaccttgtctatggtccgctgtctagaggaaaggtccactaccttttcgggatgcaaatagtagtcctcgccatattctttaccaacaaagtagttcatgtacatcaaaaattccggtgtggcacaagcgccactcaacatgctcgatacaataaacaccatattgataaaaccaccgcagaaagatttcagattagtgggtgccgtagagttacctcccaccgacatggtacctcctatcagccagggatacatggtgatactggcgcaatagttggcaagactggtttcatcgtttttatagataaagtggttattcagcagctccagataacggtcggatatctccttgccatacatatctttgaggcggtccgtcaacagacgacgattcaagcggatgaagttcggtttgggaagctcgcctatcaaagtagccacattcttattttccacattggcattggcatcatatttactgccagtggcagggttggaggcatcacaatagtccagtaggaaacggagtttgtcacgcacttcccggtcctccagatgtttctgccggtaaagcatgaatgactttgccacagcatagtagtgctcggccatcagagccacctctacctgattctgtatatcttccacactggttccgtcgctgatgctcacgcggctgagaatattggtaatgacatcctgggtagcaaagctgcccaccgataaaaatgccttactgattgcatttttgattttatcaagcgagaaagcctctttcttaccatccctcttgacgataaaagtttctgaattaatcatgtctataatttaagatttaaaaaattatcaacgacaattcatacaacaatgcacagaaaccaagtaataaaatgaatcttcaatggactcgttctatagctttttcacccgaaagcattgaatgaatgatgtaaaaacggcaggtcttctgacttgcttctgttacgatgccttcccggtccgtcatcggaccagtggcttatagagtgtcgcaacacctctcctgcaaaggagccaaagcttacagctacggggatagttcctgactttcacaggattcccttttaattccttatcacgccaaggtgactcgaaaaccatttttcgggagacaaagataaaaagaactcacgaaatccaagcattatccaaggaaatcttatcaattacttttcaacttccatttactataaataataactcatgaacgaagcattccttataagacatttatcctgcaaaaattatatagttcagacagattaaaaaaacagaacggcacattttctttcagaaaatgtgccgttcctcatacaaacactatttcaagaggtaaccatcgaataaaagattatcctgccactacttattggagttaaaaattataagcgatggttgctataaagttacggggttttgcaagttttgtagcactactgaagtaatggttattgaaaatattattgatgttgcaagacaatgttatactattttttatagtcctcaaatccgcaactacgcgcctaatatgatacagaagcgaaaagaatctgcatcgttagtaaaaagggggcacagtgcatcgaatgtcaccataaagacatataaatgccccttaccccaccatgcgacttgaggcaatacgcaaaatcacgactataagttgtcggtgttatccaaagtcattctggaacacattggcataagcattgttgcatgaatagatattcagcacatacttccttgatgtcctgacccatttggctggcacagagatgaacttaaagacaaacgtcttgatgcggcttgttgctttgagtccgaacctcttcacgtcaagcctcgccatgatgaatttatagaagttgcgtatgagtgccataagcagaagaaacaccgtgttttctcccataaaggattttggaagcctgttccagccgaatccgttattcatatcatcgaagatgcgttccttccctccacggaggttatagaattcgacaatctctttctcggaagactcgtagtcatttgtaaggatgcagcggtaggtgtattctccttcccacaggtcgagttcgccgtctatccgcttctgtctttgaatcacaagacggtatgccttccctttccatttctcgatgagaatggaggccagctcaaactcaatgccgcccaattccactttcttccaacctctgagggcaaagatgtcattgtagagcgaactgcatcggttagcacggatatagaaggtcttgcagtgtttagcaatctcttccactatctcttcagaacacgagccgcaatcagctctgaaacggttgataataagcttgttttgttcaaacctttcaaagaacctcttcagcgtgtccttctggtggaaacggacatttgtgttgccgtcgctgttctcaatgccgacaatcaagttgccaataaccgccacgccagggcgataaccaaggaacttcttgtatgtaggcttcgcatcaaacttctcagcctctatgaactggtggtcgaagtcaacgtcatacccctcgccctctttcagctgccctgtggacaataggcaattgaggagcagtgtattcagcttgtctgccgtgttgaagtcgtaggtcttgccagtgtcggatgtgtaggaaatgttatcctgggtcagttcctttatggctctaagaatcgtgtcggcactgcatgtgcgaagtgtcggatgaagcgaaaggtggtacatcagatgagtggtgacatcctcgatgcatgagccgccacaaaaataaacgctcataagcgaacggatgatttcgctgtattgataaccatacagcctgcatctcataccgagggttgagtcgattacagatgagagtctggagtcaaattgctccattattgaaaatattcctccaaaaggagtgagtttctcggatttaattgctacctttgccatgtctgtcgggtttgatacatattttgatttgcaacactaagataggtgaaaaatctgacatggcaaattcctgagcaactttttgttgctcaggtacttaaaaagttatatttgtaatagtgttgcggaattaaggtttaagtaagataggaaatgggcctttaccttcaatgtattccaattatataaattattgcataaaattattagatagtaataaaagagaaatacaagaatcgattattaaggaatagagatgaaaataatcacatggctgctatttacatttatctgcctgctgcctgcaggtagtatggcacagaataaggtcaccttatccggaaaaatcaccgaccaacacggaacaccggttgcccaagccaccattgctgtggaaaacaccacctccggcacctatacggacgaccaggggaaatattcactgcaagtcactccgggcaaacataccttcgttgtctcctttctgggctaccaaaccgtgaaacaatccttcgacatccggcaggataaaaaacagaactttacattgcaggaaagctccgtagcattgaactctgtcgaagtatacggaaagacccaaacgcagaaagtgaaggaaggggcctttgcagtcaatgcactcgacatcaagccgatagtaaactcactgaataacctcaacgacctggtgaaccgtacaacgggcatcaaggtgagagaggaaggcggggttggctcggacttcgacctttccatcaacggcttgtccggaaattcagtccgctactttttggacggaatgccactggacaccaaaggaagcggtgtttcactcgccaacttacccattaacatcatagaccggattgagatatacaaaggagtagtccctgccagcttgggaacagatgcactgggcggcgccatcaatatcattacaaagcaggaaaaaaaggattatctggatgtatcttacggcatcggctccttccatacccacaaggcagacttgaatgcacagttcgtagaaaagaaaaccggactaatagtccggcccaccgttggcatcaactactccaaaaacgattatagaatgaagaatgtacagatgcgcgacgaaagcggggacaacttcatatatggcaatcccaagcgttttcatgacggctacttctcgctactggcacaggtggaagccggatttgtcaacaaatcctgggctgatgccttctttgtttccgcctcctattcaaaaacagacaaggaactgcagacggggtctgttcaaaacaaagtatacggaatggcagaaaggaattccgattcctggaacatttctgcccgctatcagaagtacaacttcatcctgaagaacatgcaactgaatgcctccctctcccacacctgggaccattccttgaccgtggacactgcctatcggaagtactattgggacggaggatacatcgtgagccagcgcaacgagattatgggcaaagaaccatccatgcgccactacaagcgtccgctcaccatcatgcgcaccaacctggactatcagctgaatacccatcacagctttaatctgaactaccatttgagccgtaccggaaacgaccgcttcgatgaccttgataccagcttcgagccgtcaaaagatgtggttaccaaacatatcctgggactctcctacaaccagtctctgttggatggcaagatggaaaacgtattcttcataaaagactacatcaaccatcccaatatccggcagaccgaccaatccagcgtgaccggctcgaaggatgtgcaaggctccaccaccaagaactacctgggttacggtgccggactccggtatatcatcgtggaacctttatccatcaaagtatcctacgagcatagcgtaagactgcccatcgcccgcgagctgttgggaaacggtaccaccatctatgccaacgtggcactgaaaccggaaaacagcaacaacttcaatgcctctctgttcggcacatggcacccgggcaatggacatacattctattatgagatgagcggatttttccgtaaggtagacaactacattcagaccagcattgccgagaaagagggtacaatgcaatataccaacgtcccggctgtccatgtaaaaggtgcggaaggggaaatgcgctacgactggcaaggcagactgcaactcgccacaaacgtcagctaccaggacactcgcgaccagcagaagtacaagggtgacggaaagccctctgccacctataacaaccgtgtgcccaaccgcccgtggctattcggtagcgtagaggcttattataccttccgcaacattgccctgcccgaaagcagattgcgcctgggttgtacctatcaatgggtacactggtacttcctgacctgggaagcttacggcgcatatgataacaaggcacgcattcccgcccagcacatctgtaatgccgacatcacttactcatggagacgcggacgctataatctggctttggagtgtaccaacttcctcgacaagacagcctatgacaagtacaagctgcagaagcccggacgtgctttttttgctaaattcagactattcattaactaatcatttaataattcattcaaaatgagaaaattcaaatttacactgattgcctttatggctgccatgatggcactgtcattcacagcgtgttccgatgatgacccggaacctaatcctaatcccgacccggaagtcaatgaggataactatcacttcgacctatttgtcaccgtagacaaacacggtgggatgagtagcaagaataccactattgtccatagcgtcaactcattggccgcagagcagggtgtcatcactgtgaaaagagaaggttcggaactgggagattattccatggagactatctcaaaaggaaaatattactaccaaatacccgcaaccaacgaccgtttcgtaaaatatcaaatcaagaacaatgcagttcaggttattgcagaacgtcctttcaaggccaacagctataaggtacgttcctacacacatgcctggattgatgacaacacactcgtcatcatgtctaccaatggtaagaaggacaagattctttatacgaaactgaacgcagaggacttgactatccttgctgaaggtgaactcaacataccagcccccaccaactggctcaaactgacaagctccggtatcctcacctaccgcaaatcagacaacagattgtactacttctactattggaaagagacagacggtttgacgaatatagaccagcaagagcctaacttccatacagccattatcaacccctctaccatggaagtagaaaaagatgtgctctctcccatcgaatgcgaaatggcaggaagcgcttacggagaactgatgcaaaactgcgtaatgtacgacgaagcagacaatctctacctagcttgtttccacgaagaagataacgcttttttcaaaggcatcctgctacgtatcaacaaaggcgaaacagaattcgacgcttcctacaacggctatcccaatgccgacggcaaattgctgaccattcaatatctggaagggaacaaagccttagtgtatgcacgtaatgacaatgccgatagacccgctgcagataagcaacccggcatcgacgcttactctcactactacgccatcctcgatcttaccaccggaaccaagacacgcttaagctatgatggcaaggaaatcggttacagcggcggtcgcttctcacagcgttctgtcatcttcaacaacaaagcatacattggtgtaaacactgaagaagatgccaacgccgttatctacatctatgacatcaagaccggtaatgtagagaaaggagccgaagtggacggacgcttctacttcgatatgatacgtgtcatagagaacgattaaaacaagcatcagtatttatgaagaatttgtttgtctttttattcctttgtaatttcctcctcctctgccatgcgcacgggggaggcaactacgagcacagcgatatgcttgcaagtatgaaacccggcgacaaagccgtcctgctcatggtgcacttcggcactacgcatgacgatacccgtgcccttaccattgatgccatcaacgccaagacacaagccgccttcccggagttgaagttccaagaagcctatacgtcgcgcatcatcatccgccgcttgaaagagcgcggcatcacgaagctgactccactggatgccatgctgaaactgcgcagcgaaggttacacacacctcatcgtacagagtaccaacatcattgacggagtagaaatggaatccctccgccgggatgtggaaagcgcactacccttcttcaaggaaatacgtgtaggtactcccctgctctactctatcgaagatgcagagaaagtggcaagtattctggggaaccgctacaacgccccggcacaaagcaagaaagctaccaaagaacacttcgtccttgtgggccacggcacctatacccccagtaccgccatctacagtcagatggactatatgctgaaagcaggcggactgaccaatttccatgtgggcaccatcgaaggttatccaacctttgacaccatgctggtacaactgaaagccgggaaagccaaacgtgtgaccctcatacccttcatgtttgttgccggagaccatgccaaaaacgacattgccggagagtggaaggagatgctcgagaaagaaggcttcaccgtcagtgcacaactggaaggactgggacaaattccggaaattcaagaaatattcattgaccatatccgtttcggactgaagcaccgcatgctggacatcatgacgaagaaggcggcctatgctgccggaaaagacacagaataatatacccattagtgggtatttagtgttcttgaatcatcttgtacttttgcaggaaaaacgcgaacgacaatgaatgttatcaccaaactgatgtactctattcataggatactgggcactttgctctgtatcctatttctcatgtggttcctctccgccttcgtgatgatgtaccaccgctttccccgtgtcagcgccaaagagaaaatgcaaaagctggatatgctctcccaaaccggagactcacttccggacatctcctccgtcacagcccgcctgccccgtggcgtaaaggtcaggtctacgatactgaacctcaatgccggacaccccgagttcagctttagtaccacaaaaggcacgcttcatttccttgccgattccaccatctcacgaccctctctggacagtgaacacctgcaccggacagcagctttgtggtgttcttctcccattacccgtatcgacaccctccactctctggaccaatggattcccttcgctgaactgaaaaaggaaatgcccatttataaaatatactttgccgacgatgccgggacacagctctatctgagttcacaaaacggtgaggccttgcagttctccaacagaagcgaacgcttctgggcatggctgggtgccattccccactgggtatacttcacctggctgcggcaggacaccgtcctttggactaagaccgtcatctggctcacagctctgggttgtctcatggtcattgccggcatttgggtaactgtggatgtatggcgtaagacgcaccgaagccgccatcccaagttctccccctaccgaaaaagatggtatcactggcactacgtcagcggaatctttttcggcatcttcgtactgaccttcaccttcagcggcatgatgtctctggcagacattcccgaatggattcataaaccggcactgaagaaaggcagcgccacacgcacgctccatgcccgtgccccacaaccggaggattaccccttggactaccgccgtgtcatagctgcctatccccaagctttgcagatagagtggcgcaacttccgcgaacatccctactacatcgtaaaagatagaaaaaacgagtattacatcgatgccgccgacagcctgccgcgtccgttacaactctccgaagaagaaatcctgaaaggcgtggaaagcatttatacctcccagcgtgattcttcacaacatatccccggcatacgtatctcccggctcgaacatttcgagacctactatcgcgacatgagcaatatgtatcgcggacgaccccagcttcccgtctggaagataacggtggacgacccggaccggagcgtctattacattcacccggaaacgggaatcatccgccatgtagacacctcctcccgctggaaatactggagctatacagccctgcaccgcatgcgtctgcccggtctgaactccaatgccaccctgcgcaagactgtgctttgggtattgctgcttggaggtacagccgtttgcatcacgggtgtggcgttaagtgtaagtaatatttagaaatgcaataaaaaacagaatgacgagaattaaacgtaaaacgtttataattaagcgttttgcaagaattgcataatcgtctgacctgcaaaagaaaacaaaatattgcagtgtttcagttaccagactgttagccgcctgtttcggaaacaacggcaggtaaccaagtttttaccgacaggaacaaagcggatttgtattcactgtttatcaatgttttgcatgccaaaggacgcttttcaaaggagtatttttacaacctaaaaaagagcgtatgaaagtggaaaaattcaaggtgctgctctacctgaaaaagagcgagccggacaagaccggcaaggccccgatcatgggacggatcaccctgaaccgcacgatggcgcagttcagctgcaagctttcctgcactcccgagctatggaacgcgcgtgagagccggctgaacggcaaaagccgggaagcggtggagaccaatgaaaaaatagagaggctgctgcttgccgtacactcggccttcaattccctcatggaaaggaagagagatttcgatgccgctgccgtaagggacctgttccaaggtaacgcgggcacgcagatgaccctgctcaaacttctcgaccggcacaatgaggagatgaaagcgcgtgtgggcgtggaccgtgcgcctaccacgctctcgacctacctcttcacctaccgcacgctcgccgaattcatcaaaacgaggttcaaggtcccggatcttgccttcggacagctcaacgagcagttcatccgtgactaccaggatttcatcctcctggagaagaaatacgccgtggacacgctgcgcggctacctggccattctgaaaaaggtctgccgcatcgcctacaaggaggggcactcggagaaataccatttctgccactacaagctacccaagcagaaggagaccgccccacgggcgctcagccgggagaatttcgagaagctgtgcgacctggagataccggaaaaacgcaggtcacatgtcatcacccgggacctcttcctcttcgcctgctacaccggtacggcctatgccgatgtggtaagcatcacccggaagaacctcttcacggacgacgatggctgtctttggctgaaataccggcgaaagaaaaccgactatctcggacgcgtcaagctgctgccggaggccctcgcactgatcgaaaagtaccgtgacgatacccgtgccaccctcttcccgccgcaggactaccacacgctcagggccaacatgaaatccctgcgcctgatggcggggctgagccaggaccttgtctaccacatgggaaggcattctttcgcctcattggtcacgctcgaggagggagtgccgatcgagaccatcagcaaaatgctgggacattccaacataaagaccacccagatatatgcccgtgtaaccccgaagcgactgttcgaggacatggacaggttcgtcgaggcaacccgcgatttgaaacttattctttaatccccaaacaattattatcatgcgcagtacattcaagcttttattctacatcaaccgtaacaaggtaaaatcggacggcacgaccgccgtcctctgccggatcagcatcgacggaaagaaatcggctgtcacgacaggcatctattgcaaacccggagactgggacagcaagaagtgtgaaatcaaaacagccagggagaacaaccgccttgccgccttccgcagccggctggaagaggcgtacgggaacctgctgaggaaccagggagtggtcacggccgagctgctcaagaccaccgtatccggtaccaattccgtgccggaatacctcctgcaggccggagaggtggaacgcgaacggctcagggtccgctccaagaagatcaattccacctccacctaccgccagtcgaagaccacgcagcttaacctcaggcagttcatcgaatcccgcgggatgaaggacatcgctttttcggacatcaccgaagagttcgccgaatcgttcaaggtcttcctcaagaaagagctgggacacaggaacggacacgtgaaccactgcctgtgctggctcaaccggctcatctacatcgccgtggaccgggaagtattgcgtgccaacccgatagaggacgtggcatacgagaggaaagaagcacctaaactaaggcatatcagccgcagtgaactgaagcggatgatggaaaccccgctgcccgacccgatgatggagctggcgcgcaggacgttcattttctcctcgctgaccggtctggcctacgcggatacgagggctctccatccccgtcacatcggaacgacctcggaagggagaaggtatatccgcatccgccgcgccaaaacggacgtggaggcgttcatcccgctgcatcccatagccggacagatactggatctttacaacaccacggatgacgacaggccggtattcccgctgccggtccgcgacgtcctctggtacgaggtacatggaatgggcgtggcgttaggtatgaaagagaacctgtcctaccacatggcccggcattcgttcggaaccctgacactgaccgcgggtattccgatagagagcatcgccaggatgatgggccatacgaacatcgacagcacgcaggtctacgcccaggtcaccgaccggaagatatcctcggacatggaccggctgatagaaagaagaaagcctgcggcttcctttccggccgcaggctaaataaaaattgccgtcggaatcgtaaatgcaattccggcggcaatccttaaacttgaatacgatattataccaatgcagggtgataattctcctccagcagcctctcgatgtccgattgcctgtataggatcttcccaccgagctggatatagggaatccgtccttgatccctataatcctgcaggcacctgcggctgatcttcaacataccggaaaactccctgtcggtcaggaaccgttccccgttgaagggaggacggttgtcacgggcaagacgctccatctttttctccatgttgtccagcagggcaaagaacctgcggacacgttcgttctccttgtcgataatgccttccatctcttccgctctttaaaggttttcgttcttccttctttctctcacctccttctccttgcgtctgatgccgacgtagaccatcaacttctccacatccccgggcttgtaatagaacttccgctggaggcgggtgaacgccagccgtccggtatcgcggagggtttgcagggtacgtggcgaaatgtcaaggcgcaggcagacatcctgaccgtccagtcactctccggattccttacagcggtttctctcatacagtctgtccacacgtgcggacaggttctcggcacgtgccagcatcctctcaaggacaccggcctcgatgtagcgtatttccatattcctaactcgtttaaatgtcagtgcgaatataagggaagaaaccatgagaggcaagcacgaccagcacactggcaggaatagtcatggatagtcggctattgtcatgcgaaagaggtaaagaaaaaaaactccaccgtacaaaataagtatcaaaaaaatgagtataaaatctctggagtgctccatataggctaagaactttatcattgcgatttcaacaagtggttccaaacgagaaattgctcctgaaccttatttgtccttcgtagtcttttcaataaaaagagactagaacatttaattatttggaatttaaatcttatttttgtaactatgattataaaatcactggtcaataaacactttttaaggatataaacaaacttcttgttgacattcagagaaaatttgccgtttttcaaaaagatgtggaacagctggtttccaaaggcaacaatgtggcaggtatgaaagcacgtaaagctacgttagaattaaggagtttgcttaaggaattccgtaagatgtcggttgaagtggccaagtgatcttttatcgtcaagtagaatatatgttgagtttaaaatagccttcaaaaaattgtagtatcatcatggaacagaaatcaaacgttcaatacagggcagagaaagaatataagaatagccgtgaaaaattctttcttttattaagagagataatttccaattccatacatgccgttttaattcggcaaaataaagaaacgaattttatccctcagctagacctaaatattacttttgatgaaaatcaatgtaaaatcgaattaagggataatggtgaaggctttacagaaaaaaatcgtctctattttgaagaacttgataaaaaaaacctggaaaaggagcagtttaatttccatcctttgggccaagggagattggctattgtatactttaccgactcatctgaatatgaaacggtgtataaggataaagatggtacatatcaaaagcgaaccattccatatccaaatacatctgatggactttttaattttgatgagtttgtagaagagatgccagaaataaaagatacctataccaagctgacagcatacttaaacaaacaaaacacattaggacgagcaaaaacttttttttataaatacccaaactcaaaagcatttaaacaatggtttatagaaactttttttccattcattgtaaccaatgaacagcttgtagtaaatattattttcaatggagaggatgttactgtaaaaaaaggaaatattgaatctgaaacagaaagaaaaccctttgaaatcaatctcgcagagggtaataaatcttttatgctatggttgataaaaaaaggaacacaaatgcatggagagaatccggtaacctgttttgcaaggaacttgaaagcggatttatccaatgggaaattaagttattcaattgataataatgacggttatttattgtatttaacatcggaatatttcgatgaatatgtcgacacaaaaggcgaaaaaatagaaatcccaattgatgatatattaaaaataaataagaaaataagtgagatcttggatattgaatttagctctattatagagaacaaccaaaaggagacaaagcgtaatttaaagaatttcaaaaagaagtacccctcgcttgagacatttattgaagatagtaatattatcgatgataaaaagatagtaaatgagaaagatattgtacaatctgctattgacgagaagagtaggatagagaaaaagttctggaatcaaatagatagagagttcgaaaatgaagaagataaactttttagtgattctgaagaatgttataagcttttaaactcaagtttgcatatatatgtcaaacatcgagaaagtgtattgaaacgtttgcatatgttaattcaaaaatttgatgaagacggaaatgataaatcagaattagaaagctctgtacatgaactctttattaaaagaggaacaactttaagtgattcttcaaatatcaatcatttacataatctttggattctggatgacaagttcacaacattctcaaacgatttcaaagttaaaagcaccaagtcagggcaacctttgtcagatgtttacatttgggctgatgacccagaaaaaacaaaacaaattctgatccttgagttaaaatcaacaacaaacgcacataatgcaggaaataccaaagaaggaatgatagcacaggttaaaagatacgctcacgatttttataagcatccacataaaacattgaattggactgtgaatacggagcaagtacaatatacaggtatcattcttgctaggaaatccgatatagacaaggagttgacatccaatagttttagtggcggatataaacctatcccattccttgcaaattcatattactttgaggacaatttttctaaggatgacaatccgagaaataaaatggatattaggatagaattatattcctttgaagacatttatgaacttgcatcaaatagaaacgatgtattctttaaactattaaagaaagaatttgatattgaataagttaatgagaaagaagaagggaataaaatattttttaggataggaataaacggaattcatcgttttgaatcattcattacctactcaaaagaaagcaaaatacggtgagatgttaaggagtaggcagacatcctgatcgtccagtcattctccgagttcattacagcggtttccctcatacaatctgccacatgtgcggacaggttctcggagcatgtccgcatcatctcaaggacatcggcttcaatgtagtatatttccatgcgctcaatttttaatgttcattggtgcgaatgtaaagaaagaaacgatacctgccaaacaaaatcagtccactagcaggaatagccatggatagttagtttttgtcatatggaaaagaaagccgaagcagggctggattcactaccccctttggcgtatgtgaaaggaacgttgctatgaaagaaaaaattcctcttcacacatggatgaagcaacgctgagaattcgacaataaaaagatgtggcttctctgcccgggtaaatgccatgattacagagtttttcatgtttctataccatcaggccgattaccttcaaattaaaaacttatccaacctgtggcagacccggatgggaaaggcaatgataccgctgaatacgcatatagccatatgcctaaatatagagatacgacgataacgataagcccttctatcggaataaggatatagcgggatacacggataaccatatatgattatcggaacagcgatatggcaggttgtgggtatatgacagcgtccatatacctgatttcgttttttttattatcggtatttcaaatgttccaaaaagctcttttacagattaccatccgggatgatcacctaaattcacatgtaccagactttctattttcttgattaccaaacaaccagaataccaaaaaacaggataccctgaaatcctttttccctaatgacaatcggagaaagctaccataacaaacattcttgtacctgatggcataatatacctaaacagccttttgacggctgattgaccagaacttcagatccgagcttgtttcccaaaacagccggttatttgtcgaaatctgtcattctgtaaccgtccctgccatccgttttttctctgtggacgttgtctttttttctcgtggtattatggtcatgttaccggatgggaagagccatctccatcacaaccatgaattatagtgtagccatatttgtatatagccgtatgatacgctatccggataatgctattacagaattgcaatatagctggatattaaaataaggatagccggaagcgaagggagcacgcacctttccggatacagatatcttaaaatctccatttacagaagtgtataaatatcaattcactaatggagaactataaagaaaaacataagtcacacatggctacctgtcattctccatttgcagatgtgtataagtagcaatccgttaatggagacgatgaaaaaacaatcaggcgtatacggctacctgtcattctccatttgcagaagtgtagaagtagtaattcgttaatggagaataaggtatgtaaagggcagattttccgtatattcgcctccttatccccgaattatgggcgtaagtcacatggttatggagatatatctatcttttaatggggagaacagccggcaaatatctgatggaaaagccccacaaaacacaggaaaatagccacacaacagtctgatacacaataattattggataaacgtggtccgctcctgcggacagcaagttgtgttttcgtttaaccgaaaacgaacggtttaacggcgaatacgccgacaaaccatttcagcctttgcctccggagtcggtatgtttataagtggaaagacaaccgcattaaaaacagaagcaatttacaatattaaaaaaatcagaaaactttttatggagtatataatctataaaaatattacataaccatcaagtacaaaatcttattcaatcagtgattgcaaggattgtggagcttgatttttcctataatatttcatgtcatctactgttatgaataaataccattgtgataaatctggaagctgtatctggtatgtcaaagatattatttcatagagaggagatcatagactgcagaaaagacgccaccacaaacaaaattgaaacagcttctcaacttattttattcttaccaatcaggatttgtttcagaagtgaatttttagacatttctacattggatataggatacagatacatcttgtcactccatgtaagcttgtcaacaagctgacaggtatattcctcgctttggcggaagtaatataataattgtctatattgtaacctctgccggtctttctttctacaggcatgaatgccaccaccatgtcccatgacctgatagagcttgagggagttaccttctaatatgagtactgtaaatttcatgcttatatttcatgatatctttatgaaattctgctcttctccttattattagcatagacgtaattccccaagggccctatcttgagaaaacccttgaggaataatttaaatcaaccaaacaaatccttgtgtttctaccttctatctcaaatccttactcttgacaagaacgcaccccaaacccgacagcccgatagttggaggtgctcaaagggatcacttgcaacgagctgaagtacaggtagtgacccttggtcgggctggacggaaccgccgaccaatagaagccgtcgctactaacgttgctcaccatgccattggaacggtagcgataccccgacgcagggaagaagatggttttactctttgaagaatcagtgtagaaattccatcccttcaaggaactgctgctccacgttccgttgatttcagaagacgtacttgtactgcctccggttgttgtgaatccagtgaaaacattaccgggaggaagtttgaagcccacaggagagggatcatagaccgtttttacaacaggattgtcattggcggtataaacggtgttatcgacactccagagattcgcataagcattatcgccagaaacttgattctgcatcacatcgggtttgagaatatagttcataatacaagtaacgccggcagagaagttctctgttgcaggattgctttgggaagaagtgccattcttgtcataccaagttttattggtatcggccaatccgttcgaaggacgcaacggatctttacggccccactgataataaggatgattgcctcttattgtgattgaagccgagacttgtctgatggtcacttccttgcttgcgtctccagcagtgaatctcaccttgcaactacgctctgcataagttgtgacatcatcatcacaccagccgagattgacaggcataatattgtattttacgttttggtaattggttacctcaattacattgtcgatgttctcatcggtcacccagatatgccaggaccaaagtacgttgttacttgcatccttgattgcgatgacggcattgccttgttggatagaaaagcggtccactttgaaagagatattgccgccattggacccggcgttgtattttatatccgtaaccaggtccatcacatcctgccaaaccagttcggctttagccggtgtacatccattattattagcgatgtatggatcggagatccccgccccggtatgattgatgaaattactcagaatattgcttccggtattgcctgtcttataggcagactcgttggttgaacgatttttaagggcattcccatataccagagggaaagagtagtatcccggagcgctgacaacgtagcagttggcggtattttcatctgttggaccgccatcagtctggttggagaggttatagggagtatctgcagtccctttggctgtcgcattttgcaacgcggtcgtatggggggatgtatccgtaccggtctgtacgctgaccgttgcatcgtatggctgtgcagaagtcccgccggctccggatgccgtgaaagcggtcagccactccggtcgggtgtctgtccaagatactccgttatctactgaatattgtgcggtccatggggcagcttcttgaacccctttggtgttctcacggtagctggtgacactgtatggctgtgtaccgccggtataggtaaagtcggctggccccgagacggtaagcgtgtagctccagttgatggaactgctggaaattttataagtgacagtcttgccaacaggccaggatgtacctttgatgtcagcggtcagcgtgtggtcgatgctggaattgtcagtgaataccacttcgagttgtgcaccatccggaagagtctgcggaaccatcatgaaggtctgcgcttcactcgtgagcgcctcgtcaggtgtgcctgttgtcactttatccaatgtctgcgagaaggtggcaggtgtatccaaatcactccaggtctgtgtccccatattgtaagtccctttggaataaacgtttttcaaactgacgctctttacggtacctacctgcatgtcatctccgcacacgaacctgatggcggtaagggcatgattgaaactaagggccacggcagtgttggtgttgccggccagttcatccgtctttgccacgagaaggtctttttggtcgttgacatcgctcggaatagtgacgctgatggtgggagaacctgcctgtgtcctgccggaaagtacgtactgagtgttggctgtcggagcataggcgaagaacttcattttatatgaagaaccgggccagtaatgggtggaggaaagcgtatagccgccgtcggacttgctggctgtggcgttgtagaagtagttgggagttttgtcttcgctccaggaaccggtatacgagtaagccgagacaccgaaactctcgtacatgttgacatcctttatgggagtggcacgggtaagaacgcccctatcaggccggctgtccgaaggagggagggcgatgctgtcggtgtataaggtgtgtaggtaaagagaagtgcgaccgccttgtaaagatgagacgctgtcctgtggcatgtctgttcctgtcatggttcgtgccgatggaccccagctggattgtattacaggggtaaaagagatacttgtggaagttttaccgcgttccagctcatcctcacaggaggaaaggtaaatacaaccgatgacaaacaatgaaaaggatgtgcgggataaaaccgccttgccggaaaaaaacataaatcgtctcatatgcatataacattaaaaaattgtgtatgaattgtatgaacaacgaaaattattcttttgtaaaaaaacaaaatatccagaaaggaaggtgacaagatgaaaaagtgtactgaatcgttcccttgctctccaatatagataaatatagagagcaatacccaccacaatccaatccggacactgagaaagtcaattctcattgaaatgaatcacaaaaaaactaaactacatattaacatttactgattgatctgtccagtcatctactgttacagtgaagaagataggtcctcccaagacaggatcgccaggatctacacctggatcgggatctacatctggatctacatctggatctggatctccttgaccagttcctcctcctgatccacagaaattcaatgtatagatatatttcttacctggttcccaattcgtatcaatacctattgcagaaaatgcatacttcccgtccttgttgtctgtagctgtcggctgaggatacagcaatgtttcattagagccgtccaaactgtaaatacggcaaagtacagataggtatgctccagttttatcggtgtggctactgccaacccactttgtcaactgttgtggtacaagcatgaaattatcatccccgaacatgatggacctaacagtatctgccaatgttacaggggtagtccccttaatatagtaatcatttgtactacctccattttgtcctgaccagttagcccattgagattgacctaaaacataggctgccgcagtttctgtctctggaaatgtgaagtctgcagttgtcgccgcattcaccatacgaacacctaaaacctcgattttgatcttttcattggaacatttagccattacttggatttgtgaaagggcatgcttgaaattcaagggaactcccggtccttcattgacagccttcgtgcccgtattgtaagcaatgacaaggtctttttgcgctgcgacattctgctcaggggaaaaaccgattatactctttccgctattgtttatgcctactgtgccacctggcgtttgaggcgcatacgcgaaaaaagagagtccataacttggccaataataaatggacgcagttgcccaagtaagcccattatcagaagaggtgactcccaaattcgtgaaataattgctgccattaccaatagctgttacattgaatgccccgagattgctcaaggttgttactgctttagtacgcgccttatccaaagacgcgcggaaagaaatacctcctcctttgttcacgtcaacaacatcgtcgttggtacacgaggctaaggctacagcagccatagccgaaaataaaaaatactttttcataaaaaattaaaaaggtttaatgaataaaatttcgaagattctatatcaataaatacacattttacatcacattataacatccacgtctatattctgccattcatcgaccgaagggtggaatcctccaccatttacgatcggcttcggcagggagagaccatccaataagatgtagacatcccgcggatcggccgcttcgtcaacctgtttgctgacgtcaaaggtgtaataattcttgctgccgtcagccatgatagcgtaaatcaccagcttgtgcgccggttctcccatccccacttggccgaaagccagaaattccgccgttagcgtggagatcccgtcggaaaccacctcgaatggaacggtcgccggatccggcgtaagttcgttccgaccgacccgaaatcctcccgacaggcccgataaggatccggaaagaccctccggagaaagatacttcaggttagacacgttccggatctccacccggtaacggcacaccgaaagttccggataaagggttaccgtctgctcttccttggatatttcaatggccagatcgtccaggcgatcgctgtatagccggtccggagacctggcaatgcgttcgtcccacgtgccttctgcccggggaaccgaggttgatgaacctactgccagagcgccgtccggagcgtaagcctcaaagctgtcaaagaggtctatgttgcggtaaagaacggactccgtgtccgaattgacacacaaggccctataacggcctgccggtacgttaatatatcctccccggtaatccgtgaattcgtaggcctgcgccttgccgccatccaaagggaacaggtacaggcgcatggtctccggtttggcatcgggtgcgtgcacccagtcgaaaaccacgtgcagcccggctgtatgggaatggtcatcacacagttccttatgctcgcatgaactgaataccagaaccgctaaaatgaggaacgcttgcaggatataagtcatcttgttcattgtttacctcctttctcctgattgtaattgccccggcccaataaccataccagcgagatctccgctttggtcgggcccacccactgccgtgtcctcgttttctcccaaacgtagcaggcatcaaccggaacatactcgtaacatgttccgcccaaatatcccaggcccagtgagaaatcaaggttcagccttctggccacgggcagggaatagccatattcaaaaccgacaccgtaatgggccttatcccacaatgtccctccgggacggccacccatataaccgcgccccccgaattcgaaatcataggttaacagctggccgtaaacaccgacgtggtggccggtcagtggtttatcggatgcacgctgaccgaaatatttgcgcaggccgacttccccgccgtacacccgccagtaacggtggcgcctgtcatttttccaccagccgtacatccagttgccccccagtgtccatcccttgccaagagcgaactccacgccgatgttcggcacaagcagggcgtcatagacaaggttcgtcttgagccccatgtagaacggtttggaaggtccggcaacagggacggggagttggaccgtatcacgaaaaacaatcaccctctcaaccgtatcacgaacaattaccgtatcagccggttggccttccgttgctcccaccgggggggctagctctttttccatcccaacaggagcaaattcgcattcgaccaccgaagtgttgcggagctcggggaaaaaatgtgcatgcatgtatcgccatgcctgtccgccccttaaattcatcaactgccgtttgcgggaatccacgacaacaccgttacgggtcacccatacaggggtattgcgaaggatacgcaacacttcctcccgacagggcatatccgattcctcgacaagagaggttaagccctcccaatcctcccccaaagagacggttgtaaataccgaatccggcaagaaaagacgctcctgaagaatggaacggaaagaggcgagccgtttatctgacagacgtcggttaaaggtcaagcccccttcgggagaggcaccggaatgcagactcaaacggcacagcacggctgttgcttgccgggcatgaatccctgccacaaaggcatccaggcgcgaaccgttctccccataggaaagatccacaacggaactgcccacaggaaagcagatacggcaacgcaacgtatcacttccgtaaactgccgcatccatcttccagatagagcaggacaaaaaacagaaaaataaaaaaaatctcatatttattttaattatttattataatcaaagagaagctgataagacaggaaaaaagagataaaaagtttaatttgtaaaatgttttcatggaatactacggcttaataattatttatgatttgtgtcaaaaattacagcgcaaagaaaaataattaaagtcagacatatattgtcatttcggctctattatttaccatttacactcaagattactcctttttatctatatatccaaagcaaactaaactgattccaattgacaacgaaagatatcggctggggattgttctttggcgtctgttagatcactgtttcgtttcctgttgttttaatatttgtttgactgaatgcatgcagcaattgcaagacaacgctatgaaatactgttattggttgatgcggggaaaagtagaggaagaaacctaagataaactggaaaccaaattcaaccgacagagggataacggctttatccggaaccggaccgattctatgatcgattttgagtactgtagcaggaaatagggggagtgttggaacgtgcaaggctgaccaatgaacaggcgagcggttgaaaaaggaagtcggtaggtgcgccatggacaggaaaagctgaagtaatgaaccatattccccgtttcggctgatttagttaggcgacaacactattcgtccacgtcttttgagatactttatggctaatctacatctcaaaacgcacaagtattgaggagctctccttaataatacgaaaattgcccaacgatgccgcatcggaggatgagacattgacattgctttgtgcaaaagggaaaatgatactgcgcttttctttcacaatgcatctcacatgtcctaatttattgaccaatgcctctattagctaaagcgctttcaggtacgccgcctttaatgcttcgatcttcccttttgggtggtacatcgacatagctttgtttttatcacctatgcacatgatgttgatccctttcgtgtctatcagcttgagtacttcatctatctgattgaaatctgtcagtgtaatgtcaaactcttagccactaaaaagtcttgcttcagtcaccgccaaaagtcaccgcattcttgtgtctggatggtatccttcgggatccccttcgtttagcgtttgtatcaaaccttgttcaattcggctcaatgctactttggtacaatatttttccgatttagatttcccgccaaactctcttccggaatattctcgaatctcaatgagataatggattttgttcggtacgatttccacttcggatgttttcagctacttaaatctaatgttcatttgattcctgaacctgcgcagtaaaccccataaacaagacgattgcctataaagataattgtattttcataatagaatcggatttagtttcatacgaacccgatgaaaatacaagcctctgacaatttgatgaataatgaaactttttgtgactataaaagataaaagacagaacatctaaacaaaatcttactctgactatcaagcataaagtcaaaaatttattttgtgcatcagagaaactacgattcagacctaactaaaaaactttttcataagtagcattacataacatataaaaaacagacatataaagcagaaaaagtacggataacacagtcggaaatctcattgaacaatccgaatcgattcatcatataaacaggatctgaaaactctcctaaaatcagttctctgtacgtctatttatttgttctctccattctttaggaggacatcccagatatcttttacaatatctggaaaaatgagctaaagaagcaaagtcgaattcatcggcaatgctccctaacgacaaatctgtaaccgagagtctatatttaatttctcctaacaattgcatcttcatccatttgctcggtgtttccccgaattccgcaatgaattgccttttaaaagcaggaagagagagcccacacaacgatgctagttcctttacggtactgcattctttgtaattgttcagaaccttatttcttaaatcctgggatcgaccgataattgtgtagaaaaagtttgcctgttcctccctagaataataaaaacgaatgttccaaaacagttctttgagcttagtctcatgaaagtgtatacagtttgctccgtcttccagataacaaaccaaaagttcaagaaattttcgtaactcgtcctttattacaagagattccatgtgatatttgataattttttttaaatggaacagatctgaaaaagaagctttttggcagggcgatatacctccttcaaatagggcgacaacaacttcactttcttccgacgaatacatgttgaagaggctatcacggctccaaaagaacattttcccctctgaaactgtgaactcaaattcgttatacaagaactgcagatttcctttcagaacaaacaaaatacaatcttttatcagtcgctcttcatagtttattcctttatcaaatttatagtagcgaaatccttcctctataaaatttgaataattataacaggacgtatgttcattcaaataaaaaagagacatagcatatttttatttataaaatattattatttatatcttattgtataattaatatctatttctattccgcattaaatcatagaataaaacgtatgccaaaacgttacgcaaagattaatagagtgtaatacatttgtaatcagataattattatctaacaacaacagagttgcatgtggaatagaacaacacatatgtggaataattccacatataaaaaggaatatttcctacagagacattatacttttttaaatatacaatttgtattttcccggattatacgcccttagtcaaaagactatgaactctccaaaagagagtttcagttcattatgtactcttgcttcagacgaaagcgtatagttgctaccggggacttgctggcaatagcattgtagaaatagctcagggctggttctcgctccacctacttgtgtaagcataagccagtaccctaaaataatcgtgtatattgtttgtcgttacagacgtgacacgagtcttccgacccgttgcctcctcctctctgactattgaaggaacggtaatactgcggtatataaggtgtaaagataaaaagagaggataaccaccttgtaaagaagcgacactatcctgtggtacctctgtgctggccatggaacggatcaatagatcccagtaagcacgtatttcaggagtaaaaaatatgtttgcggaaatacgcccccgatccaaatcatcctcacaagaagaaaagtaaatattactgatgacgagcagtgaaaaacaggcacgagacaaaacttttccaccagctatccctaaacgaaatgttctcataatattaataaaatagcaaattattttgcaaataaaagcaatttgtaatgaaatccaattatcattttagatctatcatttaccatttatttccttttttccttttataaaatagaagtaaaaaaacagtgaaatatagaataaaaaatagcctttttaagccccataagtgaaaatttactcctaatatatcaaaaagttgtaggtgaatgaaatctctcattcgccatctaacttctttggctaattcataaaagagagaggctaactagggaaaagaaaactttttctgtgtacttgagtgaaattggcctcctgatggttaattttaaaccaattgaaaccggaaaagcttgtctttgttatacgtaaaacgtatatttgcattgaaaatatcgttctttgaatgatgcaaaagagaactaaatatagcattcgctcgtttctaaaacgttacctatcatccgtagaacaagtaataactatctatatttcaactagatagaaaatatgttatgttttgccgtatgaattatataagaagaaaatgttgtaaaagacaaaaacgctattaacgagaataaacttgtatgaataagaaaagacttggaatattcctcggcagcatagccctattgattgtctgcagctttgcggcctatcagtactggcttgctcctacacgtatacttattatcaacgcaaccctggcacaagctgccgacattgccctgaacaatgactgcgcccggatagaagtcacctgcataaaaaaagaagaggtgaaggacctttccggctatgatgccatcgtgatgtacagcagagggctataccttgacgacggccagattgccgaagtggaacgggtgggtgccagcggagtaccagtctttacgaatacgttacgaaatttcaccctctccctcaatcacaatgttaccaatgaacaacagcatacgctacgggagtatctcaagaacggcaacaagcacaactaccggaatgccttactctacctgcgccacatcgccactccccaccggtggggacaccaggattacgagcctcccatcccattgctggagaacatgttctaccaccgcgaatacggccgctacttcagtactccgcaagaggtgaccgcctatctgaaagaaaaaaatctctaccatgaggacggacgcaaccttgccctgatttccggactcaactttccgatggaaggaaaccgtgcccacgtagattccctcatcacgtgcttgacacaagcaggcttcaatgtctatcctttcacagccggaggtcaaccgcgtgccgatatgatacgtaccctccatcccgatgcagtagtctacctgcctatgggacggctgggcaatgactcactcatcaactggctgcaccaggaaaacattcctttattcatgcccttcccgctgattcagccccacgaggaatggctggacccggatacccccgtcagcggtggcacactgaccgcccgtgtagtggtgcctgagatagatggaggcatgctacccctctgcatcgctacccaaaacgaaaacaaacaaggatactatctgtacaccgctgaaaatgaacggatagatgccgtagtggaccatattaccaagtacatgtccttgagagacatgtccaacaaagaaaagcgcgttgctatctgttacttcaagactccgggaaaagacgccctgctggcaagcggtatggaagtgattccttcactctataacttcttgaaacgcctgcgttcggaagggtacgacgtcagtggactgcctgctactgtagaggagttcggcaagcggatacatcgtgacggtgccgtcatgggttcgtatgccaaaggagcacaagaacagtttttgaaaacggcacacccgatatggctttctaccgagcaatacgaacaatgggcacacgaagtactccttcccgagaaatatcaggaagtgacagacagatatggagatgcgcccggcaatctgctggtaacagaggacagtattgccattacctgcctgcaattcggcaatatcctactcttcccccagccccgcccggcattgggagatgatgagttcaaactggtgcatggaatgccggtagcgccgccccacagctacctggctccttatctgtatatgcaaaaaggattcaaggcagatgcagtgattcacttcggcacccacggcaacttggaatacacgcccggaaagaatgtggcacagtcgcaggccgactggtcggatgtactgattggtaacctcccccacttctacttctataccaccggaaacgtaggcgagggtatcattgccaaacgccgaacacatgccgtactggtcacccatctcactccgccctacgtggagagcggtatgcgccaacgctattcggccttgctggaagatattcacaaagtgctggacgaagggactgccaaacaccgggctctgggaatgaacatcaaaaaagaggccatgcgcctggggctgcaccgcgacctcaatctggattccatatccggcgaaccctatacagccgaggagttggaacgtctggatgccttcaccgaagagatagccaacgaaaagatactgggtgcgtactacaccatgaacgagccttattctgaccgcgacctgctgaccaccactctcgccgtcgctgccgacccgctggcatacgaaacggcccgcaaggaccgcgataaaggcaaaatcaccacagagcagttgcaagacttcacctatatagcccaccactacttgcctgccgccaggaaaagactgaccgccttactccagaatccacccaaggatactgcatctgtagcaccggagcttcgccccgccctactctatcgcgaacagttgcttgcctcccccgtcaacgaacagaatgccatggtgcgtgcactcagcggaggaaccgtattccctgcgccgggaggtgaccccgtactgaacccgaacgttctgcccaccggacgcaacatgtacagcatcaacgccgagaatactcccaacccaagggcttgggaagatggaaagcgattggcagaagcgactttaaaacagtacatcagcaagcacggcgaatatccccggaaagtaagctataccttctgggcaggcgaattcatcaatacggaaggagctacgctggcccaggtattctggatgctgggagtagaacccgtacgcgacgcccaagacagagtggttgacctgaaactggtgcccagtgaagaactggggcgtccgcgcatcaatgtgctggtacaagtgtccggacagctacgcgacatagccggttcccgcttgaagttactgaccgatgctatacgtctggcatcggaagccggagatgagacctatcccaactatgtggcatcgggtacactgttgcaggaaaaattactggtagaaaaaggggcttcccccaaacgtgcccgtgaaatgtctgtgatgcgtgtattcggaccgatcaacagcggatacagtaccggtatgatggcctataccgagcacagcggctcgtgggaaagcgaaaaggagatagccgaaggatacctcaacaatatgggtgcctcttatggggacgacggaaattggggagacgtccaggaaggtttgtttgcctcggcactgtccgaaacggatgttgtcatccagccccgtcaaagtaacacatgggggcccatctccctggatcatgtatatgaatttacgggtggactctcgctcaccgtcaaaaccgtgaccggcaaggaaccggatgcctatatggcagactaccgcaaccggaccaaccgccgcatgcaggatgccaaagaggccattgccgtagagacacgttccaccatcttgaaccctacctttatacaagagcggatgaaaggcggggaaggttcggcgcagatgttcggcgaaatcttccgcaacatcttcggctggcacgtcatgcgtccgtcggccatggacaaagaactgttcaatgacttgtatagaatgtatataaaggatgagaataagctgggcattcacgagtacttcctccgcgtcaatcccgccgcattccaggctatgacagccgtcatgctggaaagcgcccgcaaaggttactggaaagcatctgatgagcaactgaaaaccactgcttccctgcatgcacaaatcacacgcgaaaaaggtgccgcttgtaccgaattcgtttgcgacaatgacaagctacagtcgttcgttgccgaccagttggataatagcgagaagcagacctatacccagaacatgaaggaggtacacgaagcatccgcaaccgatggcaaggatgtcgtactgaaagaacacaaactgacttccgaacaaacggtacgtaagaacagggtgaacggagtgattgcaggcagtcttgtcgtcatcaccttcatcggactggtcgtactgttgaagaaaagaaaaaaagaataaatagaaacagagtattatggaatacgccattcatctgttagccctattcatcgccctcaattttctattaaaggtggggttctatccacgctggggaatgtggacggttgccgcaggctgtgccttttttgcgtggctggtgactccatggatgacggaacagtccaagaccgtggtggcagctttctttgcctcccgtccacagatgttgaacttgtcggtatgtgtcactctggaagccgccgtaatgataactttctgtttcgactgtttcgcagaaatgcgtacccgcaacacggccttcaaacaagcggtcaccctcttcctgaagttataccccggcatactgataggcggagtaatatgctatgtcctggcactgctgcttttcacttttcccggaatagatttcggcagtctctcatggatagcagccggcgttactttccttgcagtttgtgctgggagccttctgctgcggcatgctatcggtgataaaccactgcgcttggaagtactgttcattgttaatattttcattgttatattgagcatcattgccacgggctattgaaataaattaaagaattaaaaactaaaaagatatatggaaacaatctcaaacacactgttctggatttcgaacgggctgctggttcccgtcatagtcctgctgctgctactctttctacgtgccattctccttgcgggaggtttcttcggggagttctatcaacggatgaaattacagaagcaattcgctgaaacactggagaacatcaccccagagaatatagacggactgctgcagcaactcccgtcggcaggtaactcccctctcctccgcagcttgtccaaactgtccgcacaccgggacgacgacgcctactgcgaacacctgcttgccaattatgaagtggaagccgagaaggagttgggacgttcgcgtactttcatcaagctgggtcctatgttgggactgatgggtaccctcatcccgatgggtcccgcactggtaggtttggcacaaggagacatctcctccatggcctacaatatgcaggtggcttttgccactacagtggtaggactggtcattgctgctgtcggcatcatcaccctgcaagtgaaacaacgctggtatgcccgcgaaatgaacgacttggaatatctgtacaaagtgataagccgccaaacggccgaaaaggaataacggactaacgatacgaaaacaatgaagagtaagagaaacagattactgcacagcgattcggactccgaccccatgggtacggtagccaatctttttgacgtagcaatggtctttgccgtagccttgatggtggctctcgtctcccgcttcaatatgacggagatgttttccaaagaagacttcactatggtgaagaatcccggaaaggaaaatatggaaatcattaccaaagaagggcaggaaatcaagaaatacactcccagcgaagacccaaagacctccggtaaaagaggaaagaaagtgggagttgcctatcagcttgaaaatggagagattatctatgtgccggaataagggaatacagtacctattaatagctatttggccatcgcagtataacaactattaagtatttcaccctccgataatggtatgtacctttgcagcgttatataaaataaaacaatatatgataaagaaaagacttctcacagttctccttatgggaggaatcatcgccaccggtgcctatgcacaagcagaaaaaggtgacagcgacgatatgaccaagaaaactcacgagttgaacccggttgtagtaacgggtacgggtacacatcagcgactgaagaacactccgtctccggtatcggttatcactgccaacgagataaagcgtgccggtatcaccgacttccagcaggccttgaccatgatggtaccctcgctctccttccgtccgaacgcgatggggtcctatctgatgatgaatggactctccaacaagcacgtgctgatattggtaaacggacgcaaggtcacgggagacattaccggtaacatcgacctcaaccaaatagacatgacccgcgtcaagcgcatcgaggtgctgaacggagccgcttcttccctttatggttcggatgccatcggcggtgtaatcaatatcattaccaacgagcctaaagatgtggtagccttcagcagcaatagcagctatacgagaaagaatcaattctcccaaggcttgaatctggacatcgcccaaggaaaaatagggtcctacacttcctataaatacgaccactccgacggttggcaaaacagccgtctgacagaagacggagaagacatcatcgaaacgattgccccgctctccctgggctacagctcgaataacttttcgcagaagtttacctatgatgctacggaccagctttccttctatgccaacggcggatactataaccgcggactcgaacgtccggtagaacgcgaagacatcaccggcggaagcaagtacaacactgcctacgaaggttacaactggggggcaggcgccaaatacaaactgagtaaacgcaacgttatccagttcgactattcaggaaacaattacgcatcacgctacaaatacctgatagaaaacagcggatacctgcccggacagtatgcgcttaccaagcttcagaaattccatgatgccgagttgaaaggtatcttcggttttacaaccaacagcactacggtgttcggtgcagactatcgctgtgaagtgcttcgccgtcccgactccgatttggacaaaagtgtctatacggcatcagcctacggccagcatgaagtgaagctatggaaccatctgaccggtgttgcgggtgtacgctacgaccatcacgaacagacgggtggacgcttcacccccaaagtggcagccatgtacaacataggcaacttcaatgtacgtgccacctatgctgccggattccgtgctccgggcatcgacgagctctactaccacatgttcaagaagacaatgggtacacgggccaccatctcattgggtgacgagaacctcgaccccgaacgcagcaactattactccatcaacatggaataccgcaccagccgtttcagtgcttccgtcaccggctacttgaactacgtaaagaacatggtaacttccaaatccaccaaattcgatgacctaccggaagcagagcagaaccagttgcgtgaagagttccccgaaatcggtgacctttcatccacgaaaaacctaagtgtcaagaactacttcaatttcgagaaagctaccgtcaaaggctttgaagtgaacttgaacggcaatctgttcccgggcttcaccctggccggaaactatacctacgcctatggacgcggtctgaacgaaggaggcgaatggcaaaacatcgaacgcagcatacgccatacagccaccatcaccggaaactatacacacagctggagcgactataccttgaacctcaacttgaacggtcgtctgcaaagcaaagtctactatccgggcgacgcggacggcaatgctccgggctacggcatctggaacctcaatacccgccataccttcgacggcttccgcaactttgtcatcgaaccgggcatcggcatagacaatatcttcaacaagaaggacaaccgcccgctgaacaagaacttcgccttgtattctccgggacgttcggtagtaatcagcctggcactcagactaaaataatctctccataacgcatttagaaacaacaacaattatgaaacatcttttcatcactctctatttactcggcatcagcctcttctcctccgcacaacaagaggagaaggcggctctgctcatcacccattatggcagttcggaccctcagacacgtgccttgacgctcgacgtcgtgacccgtgaggcacaagaagcctttccgcagtttacagtgcgcgaagcatacatctcgccgattgtacgaaaaagacttgccaaggagggtgtgtacaaagacagccctacggatgcactgctgaaacttcgcgccgaaggctaccggaccatctacgtccagagcaccaccttgatagaaggcagtgagatgacctccgtccgcagggatgcagacaagctccgtcccttcttcaaggagataaaagtgggaaatcccctgctctactccgtcgaagactgcgagaaggtaatcggtatactgaccgccgaacagccggaaaagaaagaagacattgtctatgtggggcacggcaaccagctacccagcacggctacttacgccatgctcgacttcatgatgaaagcccatggactgaagaacttccacgtcagcaccattgaaggatatcctaccctggacgcaaccctgctgcaactgaaagagacacgccccaagagcgtgacattggttccgttgctgttggtatgcggcaaccataccaaggaagacattgccggcgtgtggaagacggaacttgaaaagcaaagctatcaagtgaatgtacgcatgcagggactgggcgaaaacaaagccatccgccagctctatatggaacacatcaaagctatgctaaaagattgataaccagcaagcgtaaaagggctacaccttttacataccaaggctacaccctttgctccggatggctacaccattccggacaaagggtgtagctcttttcaatgtacacagattacggacatttgtaaccatattacggattcctcctcctgcgatatggaactttccggattattctctacatttgtacaaaactaacaggaacgtttatggaagaagtaatcaagctcaatgctgtagaccaatacaacaagatgttcggtctcgaaaccctgcatccgctggtcagcgtagtcgatttgtccgaagccaccggatatcccaggcatttcaccttgaactatggcgtatacgcccttttcctcaaaaacaccaaatgcggagacatacgctatggaaaacagtattacgattaccaggaaggcacggtaaccagcttcgccccgggccaggtgaccgaggtcaacatgctggaaggtatgcagcccagcgcctccggcctgctgttccaccccgacttgataaaaggcacctcgctgggacagggaataaagcagtattccttcttttcctattcctctaccgaggcactgcatttgtccgaagacgagaaagaaatcttcctcgactgtctgaagaagattaagatggaaatccaacgccccatcgacaagcacagcaagggtctgattgcacgcaacatcgagctactgctggactactgcatgcgtttctacgaacgccagttcatcacccgctcggcagccaacaaagacatcctgatgaaatttgaagcactgatagacgactatttccagagcgacaaaccgcagaccgaaggactgccttccgtgaaatacttcgcagacaaagtgttcctctcctccaactatttcggagatttggtgaagaaggaaaccggaaagacggcgcaggaatatatccagaacaaaatcatcgacctggccaaagaaatgattataggaagcgggaagacggtcagccagattgcctatgagctgggataccagtattcgcagcacttcaaccgcgtgttcaagaagaacgtaggctatactccgagcgaataccggcacttacaggtttagacaataaggattcaccacagattacgcggattaacacagagttttttcggtttcatcaaatataagttctatctttgtatgccaatagaacatatggatatgaaacaccccaaaataattgttgccggcatcggaccgggcaatgaatcggatataactcccgccgtaatttccgctttgcaagaatcagatgtagtggtgggatataagtactatttccaatttgtaaccccttatctccacccctcaacagcatgcatagataccggcatgaagcgtgagcgcgcccgtgccgagcaggctttcgagctggcggagcagggaaagacggtctgcgtcatcagttccggggatgcgggcatttatggtatgacgccgcttgtctacgagatgaagcgggaaaggaacagcgacgtagaaatcgtttcgctgccgggcatcagcgctttccaaaaggcagcctcactgctgggagctcccgtaggacatgacttctgtgtcatctccctttcagacctgatgactccctgggaacgtattgaaagacgtatcaccgcagccgctgccgccgacttcgtgacggcagtctacaaccccaaaagtgaaggacgctactggcagctttaccgcttgaaagaactctttctgcaggaaggacgctcaccggaaacgcccgtgggatatgtgcgccaggcaggacgcccggaacaagcggtacacatcaccacgctgggagatttcaatcccgaagaggtggatatgtttacagtcgtattgataggcaactcacagtcctacgaatggaacggagccttcatcactccgcgcggctattaccgggacacgaataccgaagccacgggcatcgggcaagacatcatgattcgcagtttccgtaccatcgaaaaggaactgaagaacaagcatattcccctcgaccataaatgggctttactccatgccatacataccaccgccgattttgaaatggagcatctgctgcatacggacgaaggtgccgtggcttccttgtatcaagccatcgagaaaggcggaatcaagacgattgtcacagacgtcacgatggcagccagcggtatccgcaaaggagctttgcagcggctgggcatagaggtgaaatgttacctcggcgacccgcgcacggcgacgatggctgcagagaaaggcctcacccgtacccaggcaggcatccgcctggctgtggaggagcatcccgatgctttctttgtattcggcaatgcacctacggcacttatggaactctgcgacctgatacgtaagggcaaggcacatccggcgggcattgttgccgcaccggtaggctttgtgcatgtgcaagagtccaaacacatggtgaaaccctttacggaaatacccaagattatcgtagaaggacgtaagggaggcagcaacttggctgccacgctggtgaactccgtgttgtgctacaacgatgcggagcagttgcgcccgggcagggatgtgtaagtgaaaaaagacattccataacattacttgttacgaccgataacattacttgttatgcccctttacattacttgatattttcataagattacccgttgaatgaaacacagatttataatcataggaatggatgacaaccgttcccccttctttccaccggaagcactggcgcagatacggaaggggaaggttttctccggtggcatacggcataaggagattgtcggtcctctgctgcctgccggggccgaatggatttccatcaccgtaccgctggaccgcgtcttttcccgttatgaagaaatatttgcccgcttcgaagagacggcgacggacgactccatcattgtattcgcttccggcgacccgttgttcttcggttttgccaataccataaagcgcaagcttcccggggcagacattctgctctatcccgctttcaattccttgcagacattggcacaccgcctcgtcatgccgtatgacgacatgcgcaccgtctccctgacaggacgtccctggcaggagttcgaccgtgccctcatagagcgtgcccccaaaataggcatcctcaccgaccgcgaacataccccggccaccattgccgcccgcatgctggaatacgggtactcccactacacactatacatcggcgagcatctcggcaatcccgaaaaggaacgcatacgccggatgacaccccgggaagcggttgccggcgacttcgaacatcccaactgcctgctgctggacagccatcccggacaatgccgcacaaactccctgcacggcagcgtacaagccccggactttccagtccgtcccttcggcatccccgatgaagagtttgcacatcttgacggacgcgcccgcatgataaccaaggctcccatccgcctgctcaccctgcaggcattggaactgaaccgccgccgcgtcttctgggacatcggtttctgtaccggttccgtctccatcgaagcccgcctgcaattcccccatctcgccgtcatctccttcgagatacgtcccgaaggaaaagagctgatggacaccaactcccgccgcttcggcgcaccgggcattacggcggtaaccggagatttcctgcacaccgacctcactccctttgcccgccccgatgccgtcttcatcggtggacacggcggacatctggaggaaatgatagagaaagtgaaacaagtgctgcaccccgaaggctgcatcgtcttcaactccgtatcggcagaaagcaaggaggcgttctgccgaggaatcgagcggaacggaatggtgctccacccttccacccatatcgccttgaacgaatataaccccattgaaattatgaaagccacgctttcttaaacatacccattatgaaaacagctattattctaatctccgaagccggtttgagcatagcccaatcactactcaacgaacttcccgactccgaaatcttcaccctcaggcacgaagagggatgcacacatatagaatccgccggcaaattcacagcggaaaacttcaaccgctatgatgcctttgtcttcattggcgccatgggaatctgtgtccgcaccatcgctccttgcgtgaagaacaaatataccgaccctgccgtggtttgcgtggacagtaccggtaaatttgccatctccgtactttccggacacatcggaggagccaacgaactgacccaccaggtagcgaatatcctcggggccgaaccggtagtcaccacgcaaagcgactgcaccggtctatggggactcgataccctgccccaacgtttcgggtggtttccggtcatcaacgccgagccctccaccctcctgttggcagaacttgccaagacgcccgaagagaaaaaaagagtatgcatgaacgagcatatcagcctcttcgtttccggcaagcccaccgccctgctgctcacggtgcgcaatgaaggcacggactggatggaggcgcacctgccgcctcatgtagaagtattctaccgggtgcaggacattaaaccttcacgcttcaaactgattctgtgcgtatctccccaagtccccaacttcccggaaatgcctatgatatgctacgtgccctgtgtcgtacacctcggcatcggccttgcccggctggcaggtcccgtgcggaaagtggagaaagagattatgaacacactgaaggaatacggcatcatgccccaaagcatcgcctccatctccacgattaaagccaaaagtgacgaaccggtagtgaaagcgctccaaaagaagttcccggtctacttctatacagccgaagaactgacagagatagaggtgccccatcccagcaaaaccgtcatgaagcacatgggtacccccagcgtcagcgaagccgccgccttactgagtgcaaacaactcccggctgctggtgcccaagaagaaaggagagaactataccgtggccgccgcccttgacataagaactgtgcgccagggccacatcgaaatagtgggtgccggcccgggcgacccggacctggtttccgtacgcggacgccaaatgctggaacgcgccgacctcattctgtatgccggcagtctcgttcccagggagctgactctctgtgccaaggccggggctaccgtactcagctccgcttccatggatttggaagaacaatttgaagtgatgaagaagttctatgacaagggaaaattcatcgtacgcctgcatacgggtgacccttgtatctatggtgccattcaggaacagatgaactactttgaccagcacggtatgagctaccacatcacccccggcatatcctccttccaggcggcggcagctgccttgaagtcgcagttcaccattccggaaaaagtgcaaagcatcatcctaacacgcggcgaaggacgcacgcccatgcccgaacgcgaaaagctacatctcatggcacgctcacaaagtaccatgtgcatcttcctcagtgcaagcattgcggagcaggtgcaggaagaactgttgcaggaatatccggaaactacccccgtagctgtctgctaccacttgacatggaaagacgaacaaatattcaggggggaactcaaagaccttgccaggatagtgaaggaaaataacctcaccttgacaaccatgattgtcgtaggcgaagccatcggcaaccgtgaaggtctgtcacggctctatgcacacgagttcaagcatctgtaccggaaataaatcaacgattaatcacccataaacattcaaacatgatattaatatttggcggaaccaccgaaggacgcatagccatccaaacccttgaagaagccggaaaaactttctactattctaccaaaggggatgagcaggacgtacttctgcataatggcatccgcctgcaaggcgcgatggatgcaatagaaatagaaacattctgtgcacagcatcacataaagctgctgatagacgccgcgcacccctttgccacacagctgcatgagactctggaacaagtctccgtggaatcgaatatccccgtcatccgtttcgagcgtatcttcccgaaacgcgatgaagaacacatcacctggtgcagggattatgacgatgccatcgagaagatacagaaagaaaagattttcatcttacttgcactgaccggcgtacagaccataggtaagctgaagcctttgtggcagaatgcctgctgttacttccgcatcctcgaccgtgacagctcgcgcaagctcgcccgggaacaaggtttctccgagaagaacctctactactacacgcccggagaagacgagcaagtcctgatgaaacagcttcatcccgaagccatcctcctcaaagaaagcgggatatcgggcggattctgcgaaaaggtggaagctgcccggcaactgggtatacgcatctttgccatctgccgccccaagacatccgacaagtttatctgtgtaaacggcgagcatggcctgcgccgcataatcgagaaacatttacccgacttcttccccctgcgcagcggactgaccaccggaacatgtgccgccgctgccgccgtagccgccacctgggatgtattcaatatctacttcaaaaagcgtcctacggaatttccggtagttcttcccaacggagaaaccatccaggttcccgtagagcctcagcaccatattccccactccgaccttctggaaaacggtgacggcatgttcgagacaagcgctaccgtcatcaaggatgccggcgacgacccggacatcaccaacggaatgaaagttgtggccaatatagccatacctttccgcatagacgacccgctgccggaagacactccccaggacgactacaacatcatcgtctgcggcggcgaaggcgtaggtgtcgtcaccatgcccggtctgggacttgagctcggtagctctgccatcaacgacaccccacgcgaaatgataaagaagaacgtcaagctatggcttgaacgcctccatattgccaaacagcccaatcctattctcattaccatctccatccccggtggagaagaaatagccaaacgcaccttcaatccccgcctcggtatcgaaggaggcatttccattatcgggacctccggcatcgtgaagccattctcctcggaagccttcatcaattccatccggaagtccatggaagtggcaaaggcaacccggaaccctcgtatcgtcatcagctccggcgcaaagagcgaacgtttcatcaaggcgtattatcccgacctccccgcccaggctttcgtgcattacggcaactttatcggcgaaaccttgaaaatagcagccgaagagcaagtaccgcacgtcaccctcggcgtgatgatgggaaaggccgtgaaactggccgaaggcaatctggatacccacagcaagaaagtgaccatgaataaggaattcattcaagacctggcacgccagacgggatgcagcgaagaaacacttgccgccatcggacagatgaacctggcgcgcgaactctgggacatcattcccgaagagctgctggaaaagtttggcaaggcactgattgagctctgtcaccggcactgtgcccccttactgcccaatggcgaactaacaatattactcataaccgaaaacggaaaaatttactcatgaagaagaagataatcattaccgtctgtatggcaatgaccgtactgaccggtctggcacaaagcccgctgtcctttcatgcaaaagcaggaatcggtacctcccattttcatggaaaacactccagtagtgacacccaaatagcttacaaagctggtgtcggtacagaatatgtcctcaacaagacctgggtgctgcaatccgcattggagtttgtgtccatcggcggtaaagacgagataagccacatcggcaaggccaaaatgcatgaactgtatctgcaaatccccctcatgatagcggcccgcctccatctgggcagggattatcatgcctcgctgagcgtcggcccttatgcggccataggcgtggcaggcaagacctccggcgagacctacgattatagcagcagcagtatgcagggaggataccagttcaagatagacactttcggcagtatggtagacgggaaaatgggtaacaaccgtttcgatgcaggtattgccctgggacttacttttgaatacagaagattcatcatcggtgcagagacacaagtgggactggtaaaagtcaatgagcagataaaccagatgataggtcattcggaagaaggaggatattttcccaagaacttcgccgcattctttacgctggggtaccggttctggtaagggaacattttgccatacagagttgtttagtatacaaacagatactcaacaatataaactgaataatatggcaaaaagaattcctatcctgctggcagcaatgacagccctcaccttcgcccctcaaacagcagaggcatgtaccggtatcaccctgacggccaaagacaatgcgcacgtcgtagctcgcaccatcgaatggggaggcagtgagctgaacagccagtacgtcatcgtaccgcgcggttattcgcaacaatcactgacacccggaggcagtctgtccggcatggagttcacctcacgctatggctacgtaggcctggcagtggagcaaaaggagttcgtggccgaaggtctgaatgaagccgggctctccgccgggctgttctactttcccggatatggcaaatacgaggagtacgaccccacacgaaaagcgtcgagcatagccgatttacaattggtatcatggctgttgggaagcttttctactgtggacgaggtaaaggaggctattgaaaatgtaacggtcatagccattgacccacgcgcctccaccgtacattggcggattgcagacaagaccggccgccaactggtattggagttcatcgacggacagccccgtttctatgaaaacaaactgggagtattgacaaactcccccggctttgactggcagatgaccaacttaaacaattatgtgaacctctacccgggcagtgccgaaagcaaatcgctgggcaatgtgactatagcccctttcggttcgggaagcggctttttgggaattccgggagatgtgactcccccttcccgctttatccgtgccgctttctaccagacttctacaccaccacagaataccgcacaggaaaccgttctccaatgttttcagatactgaataactttgatatacccgtaggcatcgagtttcccctcggccaggttcctgccaatattccaagtgccacccaatggacatcggccacagatatgacaaacggtatcatctactatcgcaccatgtacaacagtacaatcagaagcattgatttgagacagatagacttcgggcgcatcgagtaccatgcagctcccctcgataaagtgaagcggcaaccgatagttcccgtgaaaattgaatagggacgcagaaacttcaagattgccgctgttgcagttgttccgcctccttcctcttcatctccgccagcaccccgcaggtcaatggaatggcgaggaagaaggtcaacatgtccgacgccgcctggcacatttccacccctttcagtcctaagaaataaggaagaatgaagatgagggggatgaagaacagcccttgacgggcagaggaaagtatcgtagcgcgtacgggcttgcggatagtctgcagcatcatgttgctgaccacaatccatgcacccaacggataggtgatgaactgccagcgcaatgctgccgcaccgatagctacaacagcagggtctcccttgcggaagatggagacaatctcctcggcatatcccatacctgccaccgcacaaaccagcaaaaagaaaaagcctaccttcacacagaaccagaatccttggcgcactctggcatacagcccggcaccataattgaatccacataccggttggaagccttgcccgaaaccaattaggaaagcattgataaacatagagatacgcgtcacaatggacatccctgcaatagctgcgtcaccatatgcaccggccgccacgttcagcaaaatggttgccacgcttgccagtccctgccgggtgagtgacggagttccacccccaataatttccttgatgaaagccagtgtaggcgtaaagtttctgtaacgtatacgtatatttcctcctctgcgccccatatatagcaaaaggatgaaactacatatctggctgactactgtggccagtgcggcaccggatatgcccatatcgcatacaaaaatcaggatagggtcgagcaccacgttgatgaccgccccactcacaatccccaccatggcatacgccgcattaccttgaaaacgtatttggttattcagcaccaatgaggcggtcataaaaggagtacccagcagaatgattcccaaatagcgctccgtatacggaagaatagtaggcgtcgaccccaaagcaagggaaagcggtgtaaggaacagcaatcccagcacagccagagccgctccgataaacaaggcaaaaaagaagccggtggatgccatcttctcggcactctccgtttcctgcgcccccaacttacgggagatgtagttccccgaaccatgaccgaagaagaatcccacagcctggataatggacatcacagaaaacacgatacctacggcagccgtagactgggtatttattttacccacaaaataggtatctgccatgttgtagaaggacgtcaccagcatgctgatgatggtcggcacagccaatgacgtaatcagccgggggaccggagtcgtcgttaagtggacataattatcctttgcagaatggtgcatcatagggaatggaatgacaagactatttgcagcaatttctcaatggagtacactgttaccggctccttgcccggtcgatggaatacgaagctgccgtctcccttcaaatctccggtttcgatatagatctccgattcaacattccggtttgccagaatcccgtttctttggaacgccttgcgcaccatggcatacttctgcccgtgacccgccaaacgtatccgggaggtatattcattggctaccctgaacagtcccgtttccaaatcgaaggcaatacccttacgggcaaagaagttgctcagactgccgttcagcgaaaggtcctcgggtgtaccgatggtcactccgttcaccttatccatcagccatattttgtccgctatctgcagggccagttccaggtcgtgggtagaaaggaaaatcgtcttgtccgtttgccggctgagctggtgaagcagttgcatcatctctactttactgggaaaatcgaggaaagctgtcggttcatccagatagatgacaggagtttcctgggcgagcgccttggctatcatcaccttctgccgttcaccgtcactcagcgtatgcaccatgcggtgtgccagatggggaatgcctaccagggcgatggatttgtccaccacagtcttgtcctctttcgaaagggttccccagaaaccggtgtaggggctgcgccccagacctatcagttctacgacggacatattgcgtatatcgcacttctctgtcagcaccacactgatgacgcgcgaaagctgcttgtcggtatagtcccctatctcttttccttcaataaatatgtttcctccaagtttaggctggaaggcggacaacgtacggagcaacgtggacttccccactccattagctcccaacaagcaagtcagctcaccactgttgattccggcacaaatgccgtctgccaccactttcacatcccccttaccggggtaaccgatggaaagattctctatatgtatggtttccttattcattcaattctcctttccgttttctaaaaagtacagaagccactaccggcgcacctaccagtgccgtcaccgagttgaccggcaaagctccctcgaagccgggcatacgggctatcagattgcagaccaatgccagggaagcgcctaccagcaatgtggcaggcatcaacacccgatggtccgaagagtggaagatggcacggcacagatggggaaccgccaatccgataaacataatcggaccgcaataggccgttacaatagccaccagcacaccggagcatgagataaccagcaggcgtgcccgcttgatgttcagtcccagattgcgtgcatagccatcgcccagcagcaacagattcatcgtctttatcagcaggaaggacaacggaagcagcacagccatgatgcagacaaacagcaccatctggtcgcccgaaacacgggcaaagctacccaatccccaaatgacatatgcacgtatatcttcctccacactgaaatatttcaatacgccgatgacggcacttgccacatagcctatcatcacaccgattatcagcagcgtcacgttgcccttcaccttctgggagacatagacaatgagcgccatcacagccagcgcaccgataatggcggcaaccgacaaggcaacctcgcccatataccccaaacggctcaatgccacaccgcccatcgccccggacagcaataccacacaagccacacccaggctggcacctgaactgatgcccaataccgaaggccctgccagcggattgcggaacaccgtctgcatctgcagaccgctgactgacagccctgctcccgccaccaatgccgtcaacgcttggggcacgcgggacttccagataatattctgccaaataacggattcatccgtatttccccacaatatgttccacacggagcgcagaggaatgtgaaccgaccccaaaagcaggttcagcaggaaaaaaagaaagatagatgccagtgtcagcaacatcaacggaagtacgggtctttttatcatttcagcagttcgtagtaagtcggtttatagtcaggcaacaaatcgggatggaaagcatgtatcaagtcttccaatacaatttcgggctgcatgggcatactttcgtagaagggtttctcacgcatgttgcagtataccactcccttctcacgaaacgcacggaaatcggcataacgcgggtcgagggacttcaaggcatcatacgtgaatgtcccgtcatagctgttgacaatgcgccaatagtcggcactctccgcctggctatatacggtttcaaaatccagcgtgacacctcccgaacggggatcgtctttcaagaaataatccgcaccggcatcacggaacagttcggcaagaaagctctttcctcccactgcataccagttgccaccccgtatctcgccgctgaataccatcggacgcttcttcacgttggcagccagctccttcaattcgttatagcgcttctctatcgcagcaaacttttcattcgcctccacttcccggcctataaacatgccgatgaattttatccattcagcctgccccaacggggtcatctccttatatcccaaatggggaaccagtggaataccgatttcccgcatggcatcatatccgccccgcttgaaaggagagataaagataacatccggattcatgctcattatcacttcattatcaaagttcccttcgataccaatcttcacggtctcgccggacttcaaacggtcgttcatctccttgttgaagagatggcgcgtactggtgatgcccaccacataatcgcaggcatccagacggatgaagttggaaagttgcagggatgtcatacacatgacgtgctctaccggcgtttcaatcaccgtatagtcgctcggtattccgataggctttatgcctttcggtaccagcgcatagtggaaagtgctgctgctttctttttgagggtcgtgtatatccaccagacggacatggtgcggaagatatttcaccgtatagcctttggcatagcacggtacaatggtagctgccgtgtctgtcgtaaccggagaatagcccgtttcggaagaagattcggtagtagtctgtcttgattttaagccgcaagaggttacgcataaaatgcacagcagtgcaatgcctatggcagatatccgggtcatgactattggggtttatagaattcgggcacaatattcgtcatttttggggagatacgcaaatgctcttcctgcaaattgacggatattgtgcctaaataatctttaaaagcccatcaagtcattcagtgcttcactcatgctgggatgtgtaaagacaaaatcacggaggaaggtatattcctgcccggtcttcatagccattgccaccaggttgatgacctcgctcgattccggaccaaacagcgtacatcccactatcttgtccgtatcggcgtccaccaccaccttgaacaatccgttcgtatcgcccaaagtcctggcacgcggaatggtggctaccggcagcttgttggcctttatattcaatcccttcttgcgtgcttccgcttcgctcagcccgatgcgtgaaagcggcgggtcgatgaataccgaatagctcaccgggtcacggtcggacaccttgcgttctcccgccccgaaaaggtcttcgcgcagaatgcggtaatcatccaaagaaatgtaggtaaactgcaaaccgccctttacatcaccgatagcatgtatcttggggttggtagtctgcaaatagtcgtccaccacaatggcaccgcgctcattcacctctacacctgccgccgccagattcaagccagccgtattcggacgccggccggtagccagcaggatggcatctgcgtgtaactgatgttcctctcccgtgaccgcatcccggtaaatgacgtcagagtctttcacggactgcacgcgtgcattcagcctgaaaacgattcctttctgttccaatacctcccggacactgtccgcaatgtcccggtcctcccgggatatcagttcggaagagccctcgagcaccgtgacttgcgaaccgaatgaaacatacatggaagcaaattccagtccgatgtatcccccgcctacaatgacgagctgtgccggcagctcagtcagttccataatggaggtgctggtatatacccgtgggttaccttgtatcccctctatcggtggaatgacggtttcggcacccgtattgatgaatatccggggagcttgcaattgtaatgtcccttccgccatcccaacttccaccacatccggacctgcaaaggagccgatacccgtatagaccgttatatgaggattgtcggccagattgtgataattcttctgacgcaggaaagagacgacctcttccttccttgcaatggactgacgatagtatgccttcttgacctcccaagaagcgtctttgtccgcatgctttgccgcatgcaccaatgtttttgtgggaatgcaaccgatattgatacatgtccctccgtacatcttttccgaacgctccactacggcaacgtccagcttccgttttgccaactcggcagccagcgtctttccgcctttgccgaatccgatgataatggcatcatactgtttcatacgtctatttccttaattggttcaatactctttttgcactgtcagacagtacgacaatggcaccggcaagaatggccgtatccttgatgaccaagcgccctgcccccgtcagcaacggaaagccgtgctcctcgcttcccaagtcgggcacccacacctcaggggttgtcaccaggaaagagagggtacccatcgtcatgacaatggcaagtgcggctcccgccagtccgattttcggagagaatatccccagaaatgtcaggatgccgatggccataatcagaatgcccagaccgtgggagaaaccatacgtattgttctccacgtgccactgatgtttcgcctcattgaactcgccctctttcagcttatactccttgtactccggggcactctttgtataaaagaagctcatgaacgggctgttcgccacaaaagggacaatcccttcagcctcataattccagaatttcaacccaccaatccatacgaaaataaccaggatggctacacgaatcaaattaacacccaacttttgagtggaagcggccagcgtcaacgcagccataaacaagttttgcaatttcgttttcatctttgttctactttttaaatggtttcagtaatatgacttgatttttgtttttgcaaagttccttgttttccaccacgtacgaaatggcaattattccgcaacagttggcaattcttcccgtttcactcttttccggtagtccgagacactctcgccggtcattttcttgaaaaaacggctgaacgcggacaagtcttcgaagcccagaatggagctgatttccttagcgcttttgtgggtatacagcagcaatctcatggcttctgcctcaatgcggtcatgaatcacccgtaaaggggaaggcaacccgcaggtcgagaacagattagaaagtgtcttgggagaacggcaaagaatatcggcataatcctgcacttgcttcttctccttgaaatgccggtccactaatacgtaatactgccggatgatgtcaaacgtcttttctttctcctgccccaccccaaaacgctggcgcgcaatgcgtgtgcaggtaatgatgaaacgtttcaagacaatccgcagcatctcctcctgcaggttgtcatggatgaccgattcctgccggaaaatgcggactatgtcatgcaggttggaagactgcccggcagaaagtgccagtttcatcaccttggaagagccataaaaaaggaatccattgcaagagacctcgttgtcatgtccatagatgcaataaaaattgctgttgaatacaaacgtcaggtattcaccgtccacctcttttacctccaggtgatgcaacggggtcaaggtcacgatttcatccttttccaggcgcatggggatatggtctatttccagagtcagcgtaccgctctgtacccaaatgaatttatacagagtcttgtcacgttgcagcgacgcacgctcatggtagctggaagtcatggctatgttgccattcaagcgggtgttcagttgataatccataaaaaacagattgttttagtaaataacaaagatagcgaatatcttgtttgctactgattatttccccacttttgtagccgttttgctgttctttaatttttaacctttaatgcttcatgcaaatgttccccgtcatatttgtatctctcggtcccggcgagccggaactgattaccgtaaaaggcttgaaagccctgcagacagccgactgtatattctgtcccgagacactggccaaagatggaaacagagtttcacgcgcagccgacatcctattgcaactcgacattccggaaaacacggtgcaccgctttccactccccatgagcaaacagcgcgaaaaagccctgagcgcctacgacgaggtctatatggagagctccaccctccggcaacaaggaaagaaggtctgtatcgttgccgaaggagatgccggattctactcttccatacattatgtatatgacaaactgcaggcagacggcatccccgtgaagcacatccccggtatccccgccttcattgccgccggcgcactgggcgggctccatgtggccagccaggaagagcggctgacggtgatacccggcattactacgacagaagagatagagaaactgacaagcgaaaacagtgcggttgtcatcatgaagctgtccagatgcaccgatgagattcaccgctgcatccgcctgcatcccgaataccggtatcactattttgagaatgtaggcactccggaagagaagtatatcaatgacagcaagcggatagcgaccatccgcttcccctatttttccctgcttatcattcgtacagagatcttttgagcccgatttaatacaatttcgcacgccataggcattattttaatgaaaatgggttacctttgcgccgttgaaatataaaaaagataagaacatgaagaaagtcgttttttatatgatgctgctggttatgagcatcggttatgcctatgcacaaggaaaggcagacatcaaattcgaacagaccacccacaacttcggcacattctccgaaaacagtcctgtggtcagctacacctttaagtttacgaacgtaggcgatgctccgcttgtcatccatcaggctgtagcttcctgcggatgtaccgttcccgaatattcacaagaaccgatagcaccgggaaagactggaacagtgaaagtaacttataatggaaccggaagataccccggacacttcaagaaatccattaccctgcgcaccaatgccaaaacggaaatcatgcgattatttatcgaaggggacatgaccgctaaagatgccaaataagcattttaccatacagaattaaggagatttttttaaatctcctttttttttgctttctttgcctaaaatgcgaagataggctgcacctcagcagaataataatgagcttgctcattttatcctgcattcggtttgcactatctttgaagtctattaaagaaaaacataaaactacaaaacctatgaaacaagaagaagaaccaatcaccggcttgccggaaaatgcgttccgtgaactgaaaccgggagaagtgtacaaccctctgatgagcccggacaagaagtattcagaagtaaatgcctggtcggtgacatggggtattctgatggccatcctcttttcggccgcagccgcctatctggggctgaaggtggggcaagtattcgaagccgccatccccatcgccatcattgccgtcggcgtatcgggtgccgccaaacgcaagaacgcattgggcgaaaacgtcattatccagtctatcggtgccagttctggcgtcatcgtggcaggtgccatcttcacccttccggcactttatatccttcaagaaacttatccgaaagaaatcaccgttacctttgcacaagtctttatcagctctctgctgggaggtgtgctgggtattctcttccttatccccttccgcaaatatttcgtgagcgacatgcacggcaagtatcccttccccgaggcgacagccaccacacaagtgctcgtctccggtgaaaagggcggcagccaggcaaaaccattactcatggcaggtattatcggaggtctatacgacttcatcgtggcaaccttcggctggtggaacgagaatttcactacccgcgtatgcggcctcggcgaaatgctggccgagaaagccaagctggtattcaaggttaatacgggtgctgccgtgctcggtctgggttacatcgtaggactgaaatacgcgtccatcatctgtgccggctcactggccgtatggtggattatcatccccggtatgtccatgatttggggagattccgtactgaaccaatggaaccccgaaatcacggcaaccataggcgctatggctccggaagaaatcttcaaatactatgccaagagcatcggtatcggtggcattgccatggcaggtatcatcggcattatcaagtcttggggcatcatcaagagtgccgtaggactggctgccaaggaaatgggaggtaagtccaacgtggaagccagtgtgaaacgcacacagcgggacatctccatgaagattatcgccatcggttccatcatcacgctgctgctggttgttctcttcttctacttcgatgtgatgcagggcaacttgacacataccattgtagctatcctgcttgttgcaggtatcgctttcctgttcaccaccgtggcagccaatgccattgcgattgtgggcacaaaccccgtatccggaatgacgctgatgacattaatcctggcatccgtagtcatggtagccgtagggctgaaaggtcccgaagggatggttgcggcactggtgatgggcggtgttgtatgtacggcactgtccatggcgggaggcttcatcacagacttgaaaatcggttactggctgggtagcacgcctgccaagcaggagacctggaagttcctcggaaccatcgtttctgccgctaccgtaggtggtgtaatgattatcctaaacaagacatacggtttcaccagcggacagctggccgctccgcaagccaatgccatggcggccgttatcgaaccgttgatgaacggtgtgggtgcgccctggctgctctacggcatcggtgcagtgctggccgtcatcctcaatttctgcaagattcccgcactggcatttgcattgggtatgttcatcccattggaactgaatgttccgttggtagtgggcggtgccatcaactggtacgtgaccagccgcagcaaggatgccgctctcaatgccgaacgcggggagaaaggtaccctgcttgcctccggtttcattgccggcggtgcattgatgggtgtggcaagtgctgccatgcgtttcggaggaatcaacctcgtaaacgatgcatggttgcagaacacctggtccgaagtgctggcgctgggtgcttatgccattctgatattctacctcatcaaagcttccatgaaaaccaaataacttttaaataccaagaacatgaaaaagattctacttttatcttttctatttgcagcgaccatgttatctgcacaaaagcccgttgagctgcccctatggcccaacggtgcccccaataacaacgaactgaccaattccggacagaaccataacaacgaatgggtgtccgatgtcaccacccctacccttacggtgtaccctgcctcccaccccaacggcatggccatcatcatgtgtccgggaggcggctacggggggctggccatgaagcacgagggacacgacatggctccctggttcaacacacaaggcatcacctatgcagtactgaaataccgtatgcccaacgggcaccatgaagtgcccctttccgatgccgaacaagccatccgcatggtacgcgaacatgccgccgaatggggtgtcaatcctcagcgtgtaggcatcatgggcgcttctgccggcggccatctggcagcttcgcttgccacactatacagcagtgacaagacccgtcccgacttccagatcttgttctatccggtgatttccatgcagaaaggcgttacccatggaggttcccgtaagaaccttatcggagaaaatccatctcaggaactggaacaaaaatactccctcgaaaggcaagtgtccccacgcactccgcaagctttcatcatgctttcttcggacgatgacgcagtgccgcccatcaacggcatcggttacttccttgccctgcgcgaccataaagtacctgccagcctgcatgcctaccccaccggcggacatggctggggattccgggacaacttcacctacaagcgtcaatggacggaagaactggagaagtggttgcgtgaagggctcgtattcccggtctctgaacctaccacaaagaaataaaagcaattatgaataaaaagtattttttactcacttgcctcgcagcgtttccctttgccctgactgctcaggagaacaatcgctacgaagagattaccaaccccaagctgacaagcatcaaccgggagcctgcccgcagcacgttcacctcctacgtcacggaggctgatgccgtcatcaatgaccgcaagaacggaacattccgcttgtcccttaacgggaaatggaaattccattatgtggaaaccttcgccgaccgccccacggacttcatgatggaccgtgtggacgccagccgctggccggacatcaatgtacccggaaactgggagttgcagggattcggtacgcccatctatgtgaaccagccttatgaattctgttcttcgggctatcctccttattgggacaagcccaatcctccatacgttccccaagaatggaatcccaccggcacctaccgccgcgagttcactcttccgggagactgggacgataaggaaattttcctgagtgccgacggcgtacgcggggcagccttctactacctcaacggcaagtttgtaggcatgagtaaagatgcaaagactccggcgcgtttcaacgtcagcgccattgccaagaaagggaagaatgtcattgccattcagatacaccgcttttccgatgccaactatctggaatgccaggacttctggcgcatcagtggtatcgaacgggacatttacttatatgcccagcctcaaatccatctcacggacttcaaggtggagtctcctttggatgagaactaccggaacggtatcctcaaggtaaaggtgcagtttaccaatgaaagcggacaaaattccccatttgtcgttggttaccgcctgctggacaagaacgaccagcagatagcccagtcctctactcaggtcagcggtgaccaaacggaagtggaattcaccaagaagaccatccaggaacccctgcaatggacagccgaaacgcccaacctctataccctcgtcgtcagcttgaagcgcccgaacggagatgtgattgaagcgacaagctgcaaagtaggtttccgtacagtggaaatcaaggacaagcaactgttggtaaacggacaacctatcctcgtgaaaggcgtgaactatcacgaacacaacgagaataccggtcactatgtctccgaagaactgatgaagaaagatttcgagctttggaagagatacaatgtcaataccgtccgcacctgtcactatccccagcaggaacgtttctacgaactctgtgacgaatatggtatctatgtcatcgacgaagccaatatcgaaagccacggcatgggttacgacctgcgtgtaggcggcacgctgggaaacaatccgctcttcatgaatgcccacctcgaccgtaccatgaatatgtacgaacgggacaagaaccatccgtcagtcatcatctggtcgctgggcaacgaagccggaaacggattgaatttctacgttacctacaacaccctgaagacgctcgacagtcgtcccatccagtacgaacgtgcactgttggaatggaatacggacatctactgcccgatgtacgctcccccttcctatctggagaagtatgcccggaacaaggagatgacgcgtcccctcattctttgcgagtatgcccatgccatgggcaacagcctcggcaacttccaggagtattgggacatcatcgaaaaatatcccatcctccagggtggctgtgtctgggattgggtagaccagggctttgccgccaagacagacgacgggcgcaaatactgggcctatggcggcgactatggcgagaacggtaccccctccgatggcaatttctgcatcaacggcgtggtatatcccgaccgcagtgtcaaaccgcagacggaagagatggggaaggtctaccagaacatcaagttcctcgacttcgacaagcagacttccaccgtgaaaatccgcaatgatttctccttcaccaatctcgacaagtacgacttctactacatcatccgcgaccacggaaaggaagtctaccgtggcaagattgaaaatatccatgccgcaccgggcaagacggtaaccaccggctttctgaacggcatacccaaagagaaacagacaacgggagacgtgcgtatcgagttctatgcagccatcaagacggcagaacctttcctcccggccggcacggtaatcgcacgcgaacagacctacgtccatactttctacaagaaagaggctacggcacagcagcccgccacttctaaggaagaaggaaatttggtggcgttctccggtcccgacttcaaagccaccttcgacaagcaaagcggcctgctcacctcctatttgtacaagaaacacgagtacatactgaacggtcagggtctccgcccattcttctggcgtgcaccgacggacaatgattatggagccaatctccccgtccgcctcaaagtctggaaagaggcaagctatcaagaaccgaaagccgaaagtttccaagtgactccgggcagcaatgccacgacagtaaaggtgacctaccgttttccacagacagacgcccgttgggacatcacctataagatatatgccagcggagtcatcaaggtagacaaccggttcgtggccgaaggagaccaagctccgatgataccgcgtgtaggcctgcggatgcagttgccggaaagctttacagacttgacctactacggtcgcggtccgaaagagaattaccgagaccgccgtacctcccagttcatcggagagtacgccatcccggtcaaggatatgtacgagccgtatgtccgcccgcaggagaacaaccatcgcacggacatctattggtgcgctcttaccgataagacgcaacgtggtttgctgctcatcgccgaccgcacctttgagctgaacgcctccaactatcccctggaaagtatggacagcggcgacacgattgacaacggcgctccgcgtaccgaaaagacccatcaccgccacctcaccgaccctctgccggaaaagatggtcgatttgttcattgattaccgcatgatgggtgtcggtggagacgacagttggggcgcaaccgcccatgaaccctatctgattcgtccgggcaaagagaacgccattgaatacggtttctcccttgttccgttcgataaaaaggaggattataaatatttaatccggcaatattgaatttaatccctccggattaagcttttataaaaaggatgtagtaaatttgctgcatcctttttacgttcaagaacaataataatcaaaagaaagaaaaatgaaaacaatgactaaatttatgttcagcgccctctgcgccgcagccatggtaacttccgtttctgcccagggagggaaagatatgttgagcaatggaataaagtatctggatgtgccatacgtagcccatacgctggaggcagatggtcccgaggaactcgtcatcaactgcgatgaggtagactgcaccacgctggtggaatatgtactggcagagacactcacccccaaattggccgacggagacatctcggaaagcgctttcgccgataacctgcaaaaaatccgttaccgtgacggtaaaatcgacgggtacacttcccgcctgcattatattgccgactggataaacaatggcgtacgcaacggcttccttcaagatgtaacgggcgccatgagtcccgacaccgaacggttgtccatctcctacatgtcttcccacccccaactctacaagcagctggcaaattctccggagaacatagccaaaatgaagaagattgaacaatccttgtccggcaaggaaattcactatcttcccaaagccaaacttcccgccgatggtctcccgtggattaaagacggcgatatcatagccatcaccaccaacactccggggctggacgtagcccacatgggaatcgctttctatgcggatagcaaactcctgctggtacacgcttcctctaccgacaagaaagtggtcgtctccaaagtccccttgtcccaaatgctgaaagacaataataagtggacgggaatacgggtgctgaggatgaagaaataaaatgaaatactataatatggaaaaggcgatgaagatttgattctccatcgccttttccgtatataggattgttcgttcctattcctccacgacaatatattcatcaatattccgtgtttctttactgaagttcacacctactttcactaatttcctgccatccaaggtataaggaatcagataacctttctcatctatttgcttcagagctgcgtcggccgtaccgtccagtttgaactcaaaaacataaatagcggtaggggtatgaactactgcgtccgcacggccgcggctgctgcgaacctcggaccggatgaactgtcccagcaaagtaaacactacatgaaaaataacctgataatgacgttccgtatcatcactcaactcgtacggaataccggagaagaatatcttaagacgctccataaacgcctccacatctccactcttcaattcacgcatgaatttagcgatgtggaaaccagtctcatcattggatacattggtataatagggtaccaaaaaattcagaaagccgtaacgaacctcatcatttggaaagcctaaagtgtatagcttcacatcatcatcatacccttttatggtcaaataaccactttgataaatcatcggaagaggattatttgtttccgcacgatattcagagaaagcggaagccagcacttccactccatctatcaatagacgtatatcgtaatcactctgcttcagcaagtcaaccaagtaagtaggtgtgccggtctgaaaccaatagtaccccatctcttctgcatcaaaagcattcaatacactgaacggattgaacattcctacaccttccggatgaaaatggtaaccatcatattgacgttccatcaaatcaatcacttcttgtaaagatatccctcttcgtttagccagtctctcaagttccggcagaaaggttttcaccaactcctctttggtaataccacacaaagcagcgtaaggagacttcatgctgatatcattcagctggttcaagtcactgaatacacttacttgcgcaaacttggtcactccggtcaggaaaacaaaacgaagataacggtcagcgctcttcaagacaccgtagaacgctttcaatattttccgatactcatccagcaagttctcgtccaagaccgcctgaagcaatggcttgtcatactcatcaatcagcacaaccacctgctttcccgtcagcgtgcatgcccgctctatcacgtaagcaaaacgctcctccggactacggtcttccttctcctgaccatagagcagctcccatttctccagatattgattaagcatagccgtcaggtcagcagcagtttcatatttccgggcattcaagtcaagatgtagaacaggatactgttcccacttcgtttccaactgttcgatggccaagccctgaaacaagtctttgcgtccttgaaagtaagcttcgaaagtggaaatgagcagactcttgccaaaccgacggggacggcttaggaaataaggagtagaagtagatgctatttgataaatcatagcagttttatctacataaagaaaaccgccttcacgtagtttatcaaaagtctgtatgcctatcggcagcttacgtatctgttccatgttattattataacctgattggtgtatgacaaaggtacgatttatatttcaaaaataagacgaaaggcgatggagattttagtctccatcgcctttcattattttactaatcatcatttcagcattactcacgtagactggtgcaatccgaaatacttcttcataaaacagatataaagaaaacaaagcaaaagaattatacctgccaaataccaataactgtaacctaaacacattatatatcctacgatgatgattgcctgcactgccatgtaaatagaagaaaccattatatggggaatcttcagctcattcgccataatctgatacagatgcttgcgatgcggtagcccgatattctcatgaagcatcaggcggtgaatgatagtcaatacactgtctaccccataaacggacaaaagaactatccagctgaaatcacccgttccaatgataagtcttcctatcaaaaaaagaaggatgaaggcaatgctcaccgaacccacatcacccgcaaagcatttggcacgcttgcggaaattgaagaaacagaagactagaacggaacagataacggtatagatgaaatccgcttccacaaaagtaaccacctccttattgacataagccaacgcagcaagaataaccagagaataaccgccggttatgccgttaatgccatccataaagttgtaggcattgatgatgcccgtacagactatcaaggctatgactatccaccaccaggacaaggagaacagcccccactgataaaacatcatagccatagcagagaaatgaaaaagcagccttgtcatctgtccggtggattttatgtcgtccacgaagctgatgaacgtcaccagtgtcaaggcaagcaggaaccagggatattcaaagtcactcgtcaggaaataggccaacgctccgaaatagaatataattccaccaccgcgtaaagtcactttcgtatgggaactccgctcattgggcttgtcgatgatattgcacctatcagctattctaaaataaaaaagttctgctaaaaacagcagaaccagtataagcagataatacataacagtattttcctctttaatttttaattcttaattgtttacttttatatttgagaacgattttatcgttctcactatcccctcctctgccctcaccggcattctgtcaattcccagggcagcctttatcttcgcattactcaccacataattctctgtcaacttgcgcagacgctctgtattcaaaggcaaatggagcagagtcccaagccgggcacagaactccatcagtcctctgtttatcttccagatatgcggcttacgctccaaagcccgacacatcaaagctatcagctcattcgtggacaaggcctcgtcatcccccatgtggtagataccactcaccacctccttagtcaacagcccttccaacacgtagcaaagattgtctatcgaagtaaaagacctcctgttctcaaaggcccccaaaggccaggggatgcctttcctcaccacattataaagaagattcagattgcctttgttgccgggaccatgaatcatgcagggacgcaggatatagacctgcttgtcatcatacggattaactttcagttctccattttcaacattcaacttgccaagaatataattctcggcagctatcttgctctccccatacggtcctatcggagcaggcaccacatcttcagtcagcatatcacccaccacactgtctgcagcggctttcacagaactgaagaatacgaacttcttcgcagacgattccagaaagaaatcaaatatcttttgggtcaatcccatattgatatcaaaataggcttgggcagcagaccggttcttcgtgtcatgggctttaccagccagatgaataatggcatcgaatttcggaagattccgcatcggaaaagaagctggttcaatatccttccaaaaaaaagtctttaccaccccctccttttcaggagcgacaatatccagcccgtaaaggctatgacgttcctttagggcaacaacgagattagaccccacaaagccgtggattccagtgataagtatgttcattgaaatatgctaaaaaatatactgaccggaaacgtggttattagttatgtatttaataaaataagtaagcactcaatttagggcatccccctttgaaagggcacttttcagtgccctaaaccgagttttgttaattaattagtcttgaatttaacattggctggcagccaaagtgattttgtcaggaaccatgttaacataatccctgcacccgttaaagatatttttgaaaaaagttccgatgaagttccagatagaactgccatgaagctttaccgttcctatcacactgtgataagttgctgccatctctgcaccggcatcactaccataatgaagtgaattgttgcgttgagtggtcagctttcgaatggttcgctcagccaggttgttgtctatcggtaattcaccatcatccaagtaagcaaagagctctttccagaaccggttcagataattgagagcttctttataataccggcttctaaattctgaatcctttgtcagttcactgtccaacaagctgcgtaactctatcagaagttccttcgttgccaggctttgcctttctcggaacctttccttgggagttaatccggcatcatcgtatttacgctccctcataaagaactcctttaaaatttcggaaaagcgttctgcattcggttcaccaccctgattggaagccttgacaaacttgttcttggcatgtgacatacaaacctggtgtacagtatctttaaaccgggctgatttcagctcattgccgataaatacataagcattgtatccgtcggacataatactcttcaactctgcatcgcccagaaagtctgtaagtacatcacgaccgcgcgagccattctcatagaagaaaatggctgttttctgagccttgttgaccagaacccaaatgtagcacttcttatagtgatcgtatttgcgcactttacaccaggtctcatcgcagttcacaatcgaatctttttccaaagctatagacttcaatacacaaaccagttcgtccaggtatgtcttacctttcttaagccagttgcgcaacgtgtttttagaaatggtcatgcccatatctgtcagccattggtgaagaagaccaaaagtcacattctttacataaacttcataggcaatagcctgcagaaattcaggagtggccctagtgccttcaaaactggttactacctccggatggccttcagaagggaaatagccccacttcggctttttaccaggctctgcacaatgaaccatctcaaaacattcttccgtcaggaaagtacgaaaactgaatacccgtaccattcttctttcaatgaggcgaccgggaacctttgtcaaatcggaaggatgctctgtcgcctctccaactactcccatccttttataaccgtcagggcgattggataaatcacgctctttcctggaagactcttttacctcttgagatggagcatgatcaaccgaatccgtacgaagcgtatcatcggttccatcataatcatctttctccttacggcggtctgaatcacttgttttagctttagattgtatcttttgacgtctatcaccaaaacgttcctgatgggcataatcaagtttttcttgaagtgattttatcttacgctcagccgatttgcgaagtttatgctcttccgataaccgattttcaaggtcagcatgtttcgattccatagaggacacctgagccttcagatccttcatctgagccataaaatcctccaaaacaagcttcatggcatcacttgtcaaccgaagatcctgattctgttcggcaaggtattgtatgtatcgctctttctgatcctctgccatacctgcactataatttatagggttgcgtgagtaggtttccctactcaacaactctcgttttgttgtaattatatcttgcagatcgatcatacttaaacctttgatttacagcattaaaggtaataaaataatcacaaaaccgcaagtggataaatagattgattatctgatttttaatgttttaactataggattctcaagaatcaaaaccacgtccttccaggcaatccgataaacagtatctgccccgttccgctctactttcatgaactgatagcctgctacaaacttcttttcgaacagactatatgaacgattatcaaatgaaaacatacggactatcctgcgatttcgagacatgactataaagacgtctccatcattgggctcacggtgaagccgttcacgaatgacagacaacacacggctgtgtttacaacgcatatcggtaaaatcacggacataataaaaatgattcagaccggtaacactcaacataacccctccaactgctctaccatacgaaccaaatcctggtagcttaaattcttttgggacaaatgcaagccattgctgatacgaatcccaacccaaatacgaaccgggtgatcatttctgcttggtgataccggttgaggttgatcactagccctggatttttcctcatgaccaattgcaggagcaccatcaacctggacttcaactacttttttacgggtatccttgtaccatttctgaaagatgttataaggaactttgttcttaacgcaaaacgattggagagattctccatgaggcaaagcctcggtctggtattgaaagtaaaacctttcaagatcttcactgctatacataaattctaaaatttttgttcgcagcgaagatagaggttgcaatcaatagccattttttgactgcttacaaaattgtagaaggataagcacccaagcattccttctcaacaagcacctttataagctaatacaaatcctcctctatttcggaaataaacacgactttcattcaaacaagacctttatatatacgaggttgaggtctatttaaaactcctcactgaaaataacacatcgtatatcatcacgcgcatccgcaatgacatttgaactctttctattgttcgtgtaagtaaccataggttcggtagctttcttcattattgaatattgttctttatatggcttaattttattcattgttccaatcttcctcctacaatgataccaatgattctaaaaagttctaattatctcccacctatttgtacttttaagtgtaacttccactgatagtagctactatttcaatagtttatcatagatctccaaataagctcccccacaagaatttgcactgaatagttcattggcacgtttttgcgcatgtgctcccaatattctgctttgttccgaattgtcaaacagataattcattttttcagctaagacatcagcatctcgcggtgcgataacaaacccagtctcatttgtattcacccaactggtgcctgtccccagttccgttgaaatcatcgctttcccataatgacacgcttccagaagaaccactccaaagcactcgccacgagtaatggaaggcagcactacgaacgaacatttcttgaataaatacgcaacatgctcattagattgatagcccaacaaatgaacattattgatgtcctcatctctaattctccggttgagttccttaaaaagagggccacgacctgcaatcaggatatttttgtttacctttttagctgcatcaagcaaataatgtagccctttgtatgtacgaagcactcccacgaacaaggcaaactgcccatattcattcacttgccgggcaaactcttcttcaaccggatgatgctcattaaatctctcgtctgaaacccataatcctatcggatgaattttatccttgcagacatttaagatagactcggtcgaagccagattaggactggtgggcacaatgacactcgcttttttaaataaccttttcacaaaaggtgcataaccattcatcagcactccccgcccttctataggtgcatgaaaagttatcacgataggcttactcgttttatgaaacagcgtaagaagttccgcaaaagggtaaggataatgcagatgtataatatctgtattctttattatccttgaaaaattcttcatcaaaccgacactcataggcattgaagaaagacggatattcgtcttataagaaatgcactttattccatcatagtcacagactcccggcttttttgaaagggatattacttccacttcatatccatgcttcatcgacatcagaccaagttgatgaatcacttcttggataccaccgtccggttcatccggatagaatgttttaaaaatgtgagttatcttcgccatctttcgtatattggttttgaattaaaattcccttaagcttatttcgaattgttgccgtaacttaggattccctttaccttcctccagtaataattgcagtaaacttgggagaaatctttttcaagcaatagtaaagagccaatgcaatcgtaactgtcaacaaaatattaaagaaatagacaacaaccattgcgaagtcacttgccggatgcaaagtgacatacaacaacttgcgaatgttcgataacaaccaaggatcgtgtattgcaaaaacaaaaaagctggcagaagctaaaaaagttgtgcttctaaaattatgcttagccactattgcagcagacaaattaagagtactaagaatgcctgctatttttattaatttaaatagccattgaacatcatgtccttggaccataaaagcataatgaacagccaccattagtaagtagaaaatatatggataatatccatatattctaactatatttacaaagttacgcttgtagatactaaagactgcacctaatgagaaaaagaataaagcttctgtgcttaaacctcttataccgatatagggcaatgaatagccgcaaagccagaatacagcaataagccaaataagaagacctttaaaacggctaagcagacaataaagaactggagagaataaagacagtaccattaaatctcttatgaaccaaaattgataagctataggatatgtcatcgtcttcttatcatcaagtattccccaaaacgaagacaaataataatccagcccggcattattaggaaattgaaaccattgtctcgttagaggaaggtgagataccgcaaaaaaacaaatcaaaaaagaggcattccaaaataaataaggtatcagcaaagtacttattctacgttttatcttgtaaatgtatgtttgcagagaataatcagctttgtagaagaagagaaaacctgaaaagaagaaaaacaaaggcacagaaatccaacctatatattgtgagaacaattgacctataaaagaataggtaggcatgtgtgtttcactccccattacctcattgcctacaataatagaaggtctatagttatgaataaacacaactcccactatgagaggaaaacgcaaaaaagctataaccctactttgcaattcatccgcattttgcttgctaaacataagttcaagacagttttagtatatttcgaaattgccccaatgcataggctttatcataatgcttaaatccgcgtggcaccctccgttcttcaacagcttttatcatatcgtctaagctctcaaaagtactatttgataataaaaagcgattgattatggtgtcgtatgccaatatggacaagtcggcatttattgcctccaccaaagccataggcaacatttcttgaagaaaggaagaaaataaataaatatctgaagatattaaataacgttctacatcatttacacatcccacagcaataatgttgttgcccctatattcatctatcaagtattgttcttctccctcgcctgcaatcaagaatttcacgttgggctcattgctcatcagcgaagccattttcaagcaatctgccaatcccttgcctggcttgaagatagcagaaaacataataatcaaatcatcatcggcaatatgcagttcctctcttaccgtttgacgaatagtagaataatcttttttctcatatctttgaatataaaagtttataaaagtatgaacgggtatgcggatatatttctttaccaactgttctgtacgaggagttatcaaaaagaaatctgtgcatatccaattaatgagaagcgagagaataaaaaacttccgttcacagaagaagaggtgctgcaagtaaattacttttttaccttttagcttagctgcaattttgtactttatcagccgcagaagatttatattactatgaataaatatgtagtcagccccggctatcaagtcaccggtaagcctattctctatgtcatggttctgattgcgaatcatcgcctcatattcagcactgtggcttttggctataaagcaagaagacacgcccatttcgctcaaggcagaagcatagttaagtgccacattttcagcccctccccgcttcaatgtgttcaaaagttgtaatgcaattttcatttaaattatttgttggatacgtattgatacaacacttcagccaagtgctcccattgcaaaccatctgccaaagattgtaaatgttgttttttataaagatattcttcggcattggcagtggctgcattaattgcttcagccaaagcttcaggcgaagccttttccagaaagtaagccgtatcggcaggtaactgttcgggaattcctcccacctgcgttgcgattgcaggaatgttatatcccaatgaaacagcagcaacgccgctttgcgatgcttctaaataaggcatcagcagtaagtgattctcattcacaaacttatcaaactcgtcattcgtcaagtatttattgactatccttacatacaagttgttatcaaattttaaagtagagatacattcatcaaattttcccgccaaagtgattgttcctattctgtcgtagtctatcaaaggtaatgcgtctgccaacaaatcaacacctttataataattgattcgacctatcatcaataagttatatctcttgggcaatacttcaattttggttttattatcaccataaacaattactccgtgaggtataataatggaaggtttttgcacgcctatatgtacttccaccctttggcgcacaaactcagacaagaacacccaatgagcagcattcttcattgccacatccatcatcttttgatgaattaccgaagtctcgcctacatgcatcactccatcatgtataactaaaaaagtgggtaccttgcaccacttacatagagacacaaagactgtatcccaattgtgaggtccaaacaccaacaccctatcatatctgccccgccaaatctttagcagaagaagcaataaataataaggcagaaagaaagtccacgaccaaagctgtcctattaatcccttatagacttttatcttcttcgcttttccgcaaaagggttcttcggttgaagcagctatccatacatctattttatcagtaggaaagtggttgagcagttggttggcatagtacacgcatcccccttcatatcccaaactgacacacaatatctttttactcataatcagccaaacaatacattgtgatatagatagtgttcatcttgtcccaattggaacactctgataacagcatacagacacacaacagccagaaaaactatcttccacctcatattcagttctttgtagattgcgggatagagaatgcaataagatgacataaacaaatagctgaagcgtacgggtagcgtatcgaattccgcaagaaagagcctgcaaaacagcatacagaaaaacagattgtagaacaatgtcatattcttccccaaagcattcagtttatcataaaacagtagtaacaatattccgctgcacatccgttccagatagccgatagaaacggctgaataattattgaacatactctttaccatatactcctccgtactactcaaaacacgcccccctatcatagatgcaccttgaatcaaaagattggaaaaaagattaatatgcgatagaaccataaagtttcccactaagaagataccccaatatacgtatttatgatacttctttgtaagaatgaaatagagtggaaaatagacaatggaactcgtgtgaaatccaaagcctatcagattcaatataaaataaggcaatgccttgcgttgtatcaagaaaggaatggaaaggtagaaaaacgagatactcttcatgttgcgcatcacatttaccgaatccagaaacaatgcaaagtatataagcattgaaagcataaaaaaagacgaataccgccggaacaaccaacatatcaccaccaaatcaattagggtggatagggtcataaaaaaactaagattgtcccatacactgttttttacgaaaaacatgtaatactggaacaatggctcagcatttgaattttccaaacgtgctacaaaactatcaaaatctgtatgacaatcatgaaaaaatgcatcgtatgcttcccaatcgtatcccacctcgtgacgaaggccaataaacaagaagtaaatgatccccccaaaaaaggtatctacattgtcggtatcaatacctctgcaccgttgccttgtgttccatgcaataatagcaataaaacacaaagcaacaagtacatagggtaatgactgacttgtacttgcacccatatatacagttaagcttctgcagtaggtaaattcaaaatctttttcttgaacaatttactataaacaccaatgaagcttttagttaccaaataatagagtaatctggaacccaatagcttttggttatcataaagcaaacatgaatgtttaaacgagccgagatgaaatctataagtctcaaaattgtacttccaaaacgtagaggccggtgaaagatattgcaagtaataaaatcccatcttgattgcattggttctatccttgggcgggagaacggattgaagcagcagacgatgcagctcttcttcattctcgggattataggtaatacccagctcgcgatatactgctccacccaacaatatcaccggcttaccatgatatacagcttcggcaccggtagtagagccccacaccactactacgtctgccctatctatcagcgcataagtacttaaactgcttccgcccgggataacagtcatgttaggatatttctcgcctaatttcagcaagtctgtatgatacttgtagggcacattcgttagattgggatgaatacgtaaataaactctcactttggggttgttctttaagaattcggctatatttacaatcgcatccaactgtgttgggaatagcctagctttatcatactcatcacccactgctgcaaattcatcttccgaactattgaaaatcacgatatttcgatagccttcatcccaattgtcgggcagttttgctttgttctgattagctatgtaatttttatcacccgcataagtacccgtctttctttgtatgaaaaacatatttccaacatgttctttttcagcttcagacagcacagactgattccaagtattataaatcatctctgtatttaaaataatgctgtgaggaatattcccacaaaaatatcttttaaggtatttgtgatggaacacgcagattgattcacacgaaacgaaaggaatattgtgcaattggcttatctcccattcgggacgtgcatcattagcacggccattgaacaacaacaccttatcaggctgtacatcagtaatgattctatctaccattaaagtgcgtcgaacggtagaacgtaacaactcatcaaaataggcacggaacacaccatccagtttagggttgcagttgcgtgtgtgtgagatatagttggaaagactcgacatacctactgatacaccattatatttaagtgcttttatctctgacaaagatttgtattgaggatgaaagtttttagcctctacctttattttctctgttaaaacactacataaagagatttggtgtataccctcggaaagtttctttcgcatacgcgtagtataacaactacacaatttacacttcatggggttgcgtttcatattctcccaacatatttccgcttgcggatcgcaatacacgaaataaacctcatgccccaatcggtaatataactcggcctcgtccatcatatacacaaatgtattgggcgaaacacctgcaaaaatcaatattttcatcagtcaaatttatgttttatgtgatagattattttaaacaatcctatcctttccaaaaaatccatgatatgcttttggcgtacctgcttttttatctgcaccctaaacagtgctttcatttcatctttggtacgaggcagactaaacattttctgcatactatcataattcttgtcaatgaaataatcattgttgcgaatggcattttcagcccaatgtcgatgattcttactgcgtgctcctccggaacacatcgctgaaggcagatttatttggttggccgaactggtataataaatggtatatccagccaaagtagcccgaatcaaaaagtctgtctcttcacgataggcatttccttctattttcacatcaaactgcatttcgcgcgctacttgggtcttacaaagacaagaagcatgacaaaatgggaccctaatcggctctttcactgtatatgtaaagtttgtggacaaagtggataaatcaacaatctgattagcctcagtagcgattcgattgcgataatgtgacaaaaactcatccagttcatcgatttgttcaggaaagaaaagcgccaatgctcttcctcccacaatatcggcatttttctctctcattacattcagcaagttacggatagaaccgggataaagcaccgaatcatcgtcaccaaaataaatatactctgactgaactttgctaatagcaacattttgtgtgtaaggttgcttcgagtttacttcattacggaaataacgtaaagtgggaaatcttgtttgcaactccttcaccacttcagctgtattgtctgaagaacaatcatcaaccaatatcacttcactcacatcctcctgaaaataagtaggaatagttatgggcaacagacgagctctgttgaaagatggtaacacaacgcttacattcattgaaatatctttttaatttgaaatttgttcaacataaagaaatagactaaaacaataggaatcattaccataatcttaatccaccacaacgtttgtgacaaatattgcgccaccactaccgctaaaagcactatcaataggataacgatgattctattcaatttacccatccaaaccttcgtgtttttatgaaaataaggtacaaaaaatggaataatagctattgtccaataagacaccaacgtagaatataccactgatacataccccaatattggaatcaaaataatggaaagaaaaatattcactgctcccggcataaaaataagccataaaagttgctttgagtctttctttatgaaagccacattggaagtaaaattatagaaaggtaacaatacattggcaaaacatataatacttgcaatggcactgcatgattggaaactctcgttacgaataacgactcgataaatatccggcatccaaatagctactgtaaaaacggcagtcaaggttgtaaattgacaaaaataatagagactcctataatcaccaaaccttttatcccgataagttttttgcaactgcggaaccagtgcaacgactaacgaagtggtaataatagtaatataatcgcccatcatatatccatttgaaaacaatccaatatcttccaaggatacttgatagagattcattataatacgcgaagaagaagagagcaatacaaagccaagagcatgaggaatgagcggccatgacaacttcaacatatccactaattttttccactttcggtctataataggttttatgccttcttttttgaaaagtaagggacaaaataaggtaaatgatacaatagctgtgacagctacaccaaaaagaaagccccaatagccagccttaaaaaaataaatagatacaaacgagacagtcataccacagatactacctaacaaagtacgataaaccaatggcttcggagttcctttcaaaggatagagatgctgtgcaatcacagtatttccaaaaagaagaagaggtacacaactaatcatagcaatcagaaaccttttttgaatacaaacttctgacaacattcccattataacacaaatatagacaatactcagtaatatacctgaaagatagaaataacatataactcttccccataataccctccaatggttagaatattcataataactattggtaagaaacagattaagtcccaaaggagctatagtaataaatagtccggaataagaggtaatcactccccaaatgccataatcaaaaggggtaagaaaaggagttattaaaggcaaaagcaaaaggtttactaatgaagccaatttgggcatcacaccaaaaccaaatgctttctttaagatactgattagaaacataaattactccctttttctcaccttcagccattcctccagccactcattcaccatctgcctgatttcatcatcctccaaatccatggagtagtaataaaaaagtgactgataagcacttaatctcacatccagcccttttttatttttccatacgtagttgtacaaatatgggcttctttggcaagagtattaatattcaagtctttctctttacgccatttctcaaataaagcacccagtatagggtggtcactgtttacattcatcgtcgtcttgtattatgttatcagaattaaaaaagtacatgttattaaacgttattttaggtttctcacatttaaaatattttccatatacagaaaatatttaatgagaaaagagccctaacttcgcacaaaatctttaaaacaacaaaatggaaaatctattcaaaatgtcacttttcatgccgcccatatcgccgataaaagacgaaaacaccggaaaaaccgtaaaaagtgccacactcaccccattcaggacaatgagcattgacgaagtacaccgtcttatcacctccgaccagagacttgccgaactgacactcgccataagaaatgccgcagcacaaggagacgaaattaccgcacgattcctcaaacaacagacactaccctacgtcactccctgcggcgtattcacccgacgacggagcgactgcctcacggaaccctccggcctggttgtagtcgacatcgaccaccttgaatccgcagaagaaacggaaaacttacggcaacaactgtttgatgacccctatctatgccctgcgctggtgttcatcagccccaccggacggggcgtaaaagcgtttgttccttgtcttcacggacagaatcctgcagaaggaatacaatgggccatgaactacgtccactgcatgtatgacgccgaaaacacacaacccggaaaaggagtggacacttcggggaaagacctcgtacgtgcctgtttcctctgccatgacccgaaagcactgctcagaaaagttgtgaatttcgaatgatgagtcattgcaaatcaccgactacaaattactaattataaattaccaaatccgatggaaccactatcttcattgcaccttctggccgaagcagtcagaaatgcaggagcagacattgctccaacctatcaagaatatatacaactggcatttgccattgccaccgactgcggagaagcaggacggcatgattttttaagtctgtgcagcctgtcgtccaagtacgaccgacgggcagccgacaagctcttcagcaatgccttgaagaccggccgtaaggacgtgcatctgggaaccgcctttcatctggccgagctttgcggcgtgaagattcagcatgaagccgcacccgccattggtacacttggtacacaaagttcacccctctcttctacctcacacacacgcgcacgcgaggaagagtccgcatcgggcattgaaccactgtctccattacccactttcgacgaacacctccactggccttatcccctgaatcgcatcatgagctgcggaacctccctcgcccaatacgatgtactgctactgggtgccatcaccgtattgggtgccagtatgggaaaacacgtccgatgttcctacggaggaaaaatgatgtccccctgcctgcaaacctttgtagtagccctacctgcatccggcaaaggagtgctctccttggtacgcctgcttgccgagcccattcacgatgaaatacgtgggcaggtagacgaaagcatggcatgttaccgccgcgaaaaagtaaaatacgacacactgggcaaggaacgtggaaaaacggagactcccgtaatgcctctcaacaagatgttcctcatctcgggcaacaacaccggaaccggcatcctgcaaaacctgatggactccgacggcaccggactgatatgcgaaagcgaagctgacaccatctccaccgccatcggttcggaatacggacactggagcgacaccatgcgcaaagccttcgaccacgaccgactgtcctacaaccgccgcaccgaccacgaataccgagaggtaaagaaaacttatctttccgtacttctgtcaggcaccccctcacaagtgaaaccactgattcccactgccgagaacgggctcttttcccgccaagtattctactacatgcctaccatacatcattggcaaaaccagttcgaccgcaatgacagcgatcttgaagataccttcaaggctctgggcatggaatggaaggacaaactgaaaaccattgtcatgaacggaatattcacccttcaccttacggacggacagaaagatgaattcaaccggctcttctcccggcttttcgtacgctccggactggccaacggaaacgagatgtcaagcagcgtggcacgtctggccatcaacatctgccgcatcatggaagtggtggccatgctccgcgcaatggaacaaggggaaatcaccgcctcgccttacgtgtcacccgaccctcacacagccacagacaatctgaaagaccacattgtcagccgatgggatctcctcattgcttccgatgactttcatgccgtactctcactggccgaaagcctttaccggcataccacccatatcctctccttcctgcccaacaccgaagtgacaagccgcggcaatgccgaccgggatgcgctggtagacagcatggaagaagaattcacacgagcctctttcctgcagaaagccagagagatgggcatcaaatcggaaaccgcctccacctggctcaaacgtatgcagaaacacgggctggtggaaaatgtagatggcaagggaaactaccggaaaccaaaagtctgacattcacttcgcttcacgcacgcgtatgtgtgtgaggcgaaaggatggatgaacctctgtaccaagtgtaccaacctcacctttacgattcccggcctgacctttacgccatccaacctcaggtttaaggctctcccagtgcagccactatcagccgcacctgggcaggcgtataagagcgggaacgggaagaaccacccaaggcggaaagtccgtcacgcaaatcgggacaaaggtctatccagtgtttcagtttgcggaaggcagcctccggacaaagattgggacaatagatttgggccaattcagtacgcccgtatgtacgtatgacaaaagaatccatagttgacagttacgatttatatttcatcaaaagtaactataaatcatgacattatcaaacttacaagcgtaaataaccgactaaaacagacccaaacagacgagaacctgcaaaaaccggcaaacgcccatatccacagccttatctttgcatcgttgagttcaacacagcaaatgtttttatcctttaacttctaaattttaattgtatgattcgttacaaaaagtatcaagtgacgggcgaagacagcccactgaaaggcctctggtatgcacgccccgtaatcgaagaaaccttcgacatcgaaaaattggccaagcacatgtccaatcacaacaccccctattcgagtggtgtcatcaagggggtactggcagacatggtttcctgcaccaaagaattgattctggacggcaagaacgtgaaactggatgaccttgccatcttctccgtaggaatcgtcagcaagaaaggggcgcaatccgctgccgacttctcgctggccaacaacgtgaaggggctgaagctccgcgcccgtgccaccggcgaactgagtaatgcccaaatcaacctggatggacagctgaaggaatcttccctgtacaccgtaggcggaaaagctcccgatggcagtggttccgacggcggttccggaggaagtgacggcaatcaaggcgagaatccgttaggatgagaataattacaaattactaattatcaattaccaatcatcatgagtgaagacaaaaagtcaaaatccgtgtggggcattgtcctcaaagtaatcatcaccgtagctaccgccatagcgggcgctttaggtctgggcgcttgcaaatagccatgcgcacgattaccctgctcattgttcattgctcagccacgcctcagggcgtggccctgagctttgaggattgccgccgcgaccacatccgtcaccgtggcttccgcgacatcggctatcatttctatctgacccgcgacggcgaaatacaccgcggccgcccgttggaaaaaacaggtgcgcattgcctcaatcacaaccgtcattctatcggcatctgttatgaaggaggattggacgccgcaagttgtccttccgatacccgcacactggaacagaaggcttcgttactggcactgctacgtgagttgaagcgtatctttccatgggcgctgattgtggggcaccatgatttgaatccagcgaaagcttgtccgtgtttcgatgcggaaagggagtatagggggctgtaaaaggctcccttcttcattctatcatccgcactatctgaaatgcttcggccaagtgtttgcctacggtatagccgcgaaaccgggcaagggctttcaatgcctccgaagagcgcggatgcggaaaagcacggctctcaaactcataggctgccatcgcagcacattttgctttcaaatcatcctccgaaatctccatatagaaattggccgtgaaatggcgtgggtcgcaagtagcctgccactcactggctgatggggtctcgaatgtaaaaatagccttcaccggttcgtcctccatagggcgtgtggcagtcatcactgcttgaaaagtcatctgatggtcaatattaaggtcgccaccatggtgagtaaagataaagtccggacgaaactgttccttctcatgctccactacctttacgatatcaagcagtgcatggctgtcaaaacggttgtcggaaaaattatatgcctgcacgctgtgatagcctatcaactgccgcgccgtctccacattctgatgatgcctttccaagacttccttccactgttccgtgtcacgggtatctgagcgtgaagtaatcccctctcccataatgatgacccgggtctgtactccttgtgtcttgactagtttgtgcatggtagcgcctaggcccagcagttcatcatcgggatgggcggcaacaaccatgatacgtttattggtaaacatagccataaaaaattattctaatatatcattaaagctcaagggagtacctctttcaatgtcatgagcagcctttttacctaatacttcgtctaaatatttaggctccagcccattccccggacgtatcgaacgaacattattttccgtgaaaacatcaccggctttcatactgttcacaacaaataaagaacgacaaaactcacgtccttttatcattgttgtatctgtaggataaatcacatgccctatagcatcttcaacctccctgacctgcttcaccattaaagcaaactcatcgggttccatcgaaaatgaggcatcaggtcctccaattttacgatccatgataaaatgcttttctatcacggtggcccccacagcaacggaagccacagaaacggttgttcccatcgtatggtcagataatcccaccggaacttggaaacgtttcctcatatctgcaattacagacagattggcatctgaaatctgggccggataagcagacgtacatttcaataaagtcacctgctcatttcctacacttctacatgtctgcaaggcaagctctacatcattcaccgtagcaataccggtagaaataatcataggcttacctttagatgcagcatattttatcaattctatatcggtaatctcgaaagaggcaattttatatatcggattatccaaggtttccagaaagtcaacagcacttttgtcaaaaggggtagaaaaacaaactaacccctcttcttttgccacatgaaaaatttcttcatgccattcccatggagtatatgccttttgatacaaatgatacaaattttctccattccaaatagtaccatgaattttgaaccattcttggttactgtcaatagtcatggtatctgccgtataggtctgtatcttcacggcatccgcaccgcaccgctttgccgcacgaatagtgtcaagagccacctgcttatcatgattatgatttgccgatagttcggctataataaatgtcttattcatgattacttctttgttatttttacgtcagccacaatactaccatccgctttgatggacgcacgtgtaaactcatatctgaactctcctttttcaatataggcatgaggatagccatcagcatccagcatacgaatataatcgaaaatctcctccaatttttccagtccactcatatcgctctgttcaggctttcgtcttttaaagacaacggggtctccctcttgtggcaccggctgcagattattttgaataatttcaactatcatctttccaacaagcttattgaccctgacaaaaatttcttcggcagttcccgataaagacaaatccatttttaaatagaccggtccggtatctaatcccacttctacacggagagctgaaagttttgtcgccgtcagtccccgaacaataagattttgcaatgggcttcccccacgtccatagggtaaatcagtcatgtggaatacgatacattcatatcgttcaaaaatagcagaaggaattatataagaccaatgcggaataaatattttaaccggtgatattgaaccaatccgttcaactgtgaaatcctctttttgagatattaagtaaaaagcatattgaggcattgttgactggagataactaaccaactctttattccaactcttttcagaaacgattaaaatattttccatctagttctactctctaaaataatgtttagttattaatatcctcattaatcaataacttatatatcaaaatatcgtcagaaatcaaactgtctctacactcaagaaaaccgtttttgagaaaaaccttttgggaggatacatttgccgcctttacatgagcaaccaaagaattaacattcttcatgcatttaactttctcacttattaattctataatgacatagcctaaacctctaccccgatattccgatgcaatggaataatcaatcagagcttcacccttttcaatattcagcctcacttgtcccactggcataccgttctctattaaaatataaatcttcacatcttccttttgcaaacatctggtaaaccaattacaatgctcctcataattaatctcatctgtattaaatgcgctctgcctgactatggggtcatttacccacttataaagcaaatccctatccatagaacgaacttcacgtaaatagcagttatccgctaagtttcggaaaaatgaaatataacgcctctgaacacaattattcacactggtattgcttaatcgcaaaaagctcacattacacaaatcaacagacggttgccttacattccctaaccctatgatccaaccatttgaaatgagcaaatcataaaactccttttgattgtctacataccatcccgccgcaactttagcaccacatgccaatgcttctatacaaaccgaactggcagaacaaatcactaaatcggagtcgcagaaaaggtctgccatttcttgtgccgtaaggcgcgaacgataaacaaggcgactgtcctgcacacacgatgaatgaggagtgtaagcatctcctactactgccgtaatactgttcacagtacagagtcgaagtacctgattcacaaaataaccagttatatcatgaatgtcacttcctccgaaacatacagccactttctctattctatctgaagaaatacttttcctttttgccgcctctaagaacggcttgcgcaacagtgcccaatcaaatcccaaacagagcctggtgtaaaattccacgtcgaaaagtgcaggattggtctgaccatggttaatcacaacatcagccacatagtgcttgtcgtgcatatcatccacacacaccaggcggcaccctttttgcttgatggcacgctggtaatcggtagtgaagaaataattgtcgagcaccacaatttcatcaccttgaagactagaaaggaactcatcataatgcgcttcctcttgcaaggtgacaaaaggacacactttctccatctcacttacctgatatgaggtgggatggcaagtaaagaaggtacaatcaaaatcgtccttcagcatatcggccaaagccagagtacggataaagtggccgtagccgatggtagcgcttgcgtcggcacggaaatagatttttttcaagaaatgaaatgaattaaagaattacaattcttttctaatcttctttatagttgccagcatgaaaggaagataattcttcaccacatcataaacaactgctgcatcaaggtcaaagtaatgatgtgctatgatatctctcattcccattgcacctttccaatcaacttccggatatttagcaaatagcagtttttctgtaagtttatcaatacctttaagtccttcacctatagccatcagaagcatgcaggtactttcaaggcgttccatccctccgggagatacaaggtagtaatgataagaatctataggacgagaattatccaagattcgctcaatcgcttgctctatcttacccaacatggcttcaaccatttcccttttatgcataaacgccttcctctattatgttctgtttcaatattccatccatatcttcacgtagcctcacaatatccactgcacagccaaacaggtgttgaagctcttctttaatgtgaaccaaactgaacatattgggtgtctgcaattctacacaaacatccacatcactctcaaccgtttgttcaccacgcgctacagagccgaatattcccatacgcataatgccgtatttagaagcattttcagccatatatttacgcaaaagagtaatgtattcagacgttgtcttcatatttctttgtttttactacatacaaagatagggataaatatcaaaactaaaaacattcagaatctttttctacctacactccctttaaaaccatacacgaaagttatttatgaagcaactcatacttcatctctgccaatgcccagtcagtcagtgtatcaaggtcctgcacttcaagttcggaaagtaccaacccggctgtattctcaccccaaaaagtccggctctccacaaagggagcagtgcgagagaaatagaactgaccggcatcgtgataaatcggttctaaatcttgggaacgtgtatttttgtattcgggataaaccatactaatttttccatccacgatgtgaaggctgcgctgtatgggataggaataagccacacaagtgaagacggaatctatctccgaattcatttttccgtatgcttcccggagtctttcgggagtgacgaaaggagccgttgaataaatgcaacaaaccgtttcaaacttcctgccttgctctttatacttcctcagtacttcaagaattacatcatcagtaccggcatagtcatttgacatctcggcactccgcataaaaggaacttgagcaccatatttacaagctatctcagcaatctcttcatcatcggtagaaaccatcacctcatcaaaaagaccgctttgtaaagctgcctctatggaatatgcaataataggtttacccataaagggcttgatattcttacgcggaatacgtttactgccgccacgtgcaggaatgattgctatatttttcatttcgctacaaattctataaccttttcaatcacatactcctgttcctcgtccgtcagcgtgggatacatcggaagactcagacaatgttcgtaatactcttctactataggtaaatcgcctttcctattgccccactgctgatagtaaggcatcagatgaagcggagcataatgaacctgcgcatagacattgttctcgtgcagataattataaagacccaagcggtcagctacttgaatgatataaaggtgataagcatgatagacatcggcagtattgaacggagtcttgataccatctattccggaaaacgcttcattatagcgtcttacgatttcatgacgacgttcaagacctgctttcgcacgctccagctgagaaatacccaaggcagcctgaaaatcagtcagacggtaattataccctaactcctgcatctcgtaataccagccaccatgatgctcgtgcaataaggcagggtctttcgtaatgccatgcgtacggtaaagacaaagcttgtcatagagctccttgctgttggtggtcaccatgcctccctcacccgtagcgatatgtttcacgggatggaaagagaatacggcacagtcggcaaaacaaccgttaccacaatgttgtttcttgcctttactgtccatgaaatagccgccgggagcatggcaggcatcctctataatccacaagccgtactcgtcggcaagctttctgaactcttccagatccaaaggatagcctgcaaaatcaaccggaacaatacctttgtaagtaccgcggggagcagccttaagcatggcttcgagtttacggatatccatgaggtaagtatccttgtcaatatcacagaataccacctcgccgccacaatagcggatgcagttggcactggcagcaaaggtcatgggagtgacaatcaccttgtcgcccggctttacattcagtgcggtagctgcaagatgaagccccgaagtggcattgttcaccgctacggcatattgtgcacctacatattcggcaaatttcgtttcaaattccctgattttgggaccttgtgtcaggtaatcgcttttcagggtatcgatgactgcccggatatcctcatctgtgatatgctgacgaccgtatggaataggcttgcttatcatttcacctcgaaattagggtcaacgtatttctttatattctcgcgcatagtctctactgtctcccactccgtattgttgtcactgctgtagtggaaaccgtcgggaacgggtactgcattgtgatgtctgatgaactcttcgcgactgtgcttgaaagatacggaaggaagaatgacataatatctgcccaaatcgattgtatcaagagcatcggttacagtaatcatctcctcgtgcagcttctctcccggacggatgcccacttccacctgcggcagattgggtgcaatggcggtagccacgtcctggatatgataggaaggaatcttaggaataaagatttcaccacccaggtgatgtccgatggcatacatgaccaaagcgacaccggcttccagtgaaatgttgaaacgggtcatgcgcaaatcggttatgggaagttccttcgccccgttgtcacgcttgttgataaagaaagggattacggaaccgcgggaacccatcacattgccataacggactacggagaacctgatgttcttggaaccgctgatattgttggctgcagtaaacagcttgtcggaagtgagcttggtggcgccataaagattgatgggggcacaagccttgtcggtagaaagggccaccacatgctgtacaccggtggcaagagcagcctttatcacattctgcgcaccgtgtacattggttttgatgcactcttcgggattgtattcagcggtatccacctgcttgatggcggctgcatggataatcacgtccactccttcgcaagcccgcgtcagacgttcgaggtcacggacatcaccgataaagaaacgcagttgcggatacttatgaccgggatatttctgtttcagctcaaattgcttcagctcatcgcgggagtaaataatgattttctttacttgcggataatcacggaggatggtttccacaaacttctttccgaaggaacccgttcctccggtaatcaatacggatttattgttaagcattataatgaaaagttttattcatcgatatattcccacggatagggattgtctgtcacattctgaaactcatcaaccgcttcctgctgttcgggagtaagtgataaggaatcccaggaggcgatgatggaacggccctcgtcggccaaagactcgtcgaacacttcaccgtagcaggcggtaagcagacggagcttcagtaaggaagcgggaagggcatcgagcacatcccaacaacagtccagcactttctggacatgccgctgcttttcgccatggtcgacaaaagaggcgctgtaacccataagaagggcaagacagacatttgcctgctcgtcgatggtagtgccttttacacccgaccggtacaaagccatggtaagacggtagacctcaccgttccgccgtgacaagtcatcgctatagacgggactaccgtccatacccaaatacatcagttcgtgcgcagcacgctgaagagtgattgcttcttcggaaagagacataagcaattatagaattaaaaattaaaaattaaagttcagccgattacttctataagatcgggatggatagtggccatggcaacagctatgacaccttgtatttcgataaccacgcgacggtcacgtgcgcctttcaccttcagaaatataccctcttgcccctcaaattcaccgccggtaatccggactttggtacctttggacaagttcaattcatccggttgaaaataaagaagatggtcatcgtaagtgccggatacggcaatgaaacgctgcatctgactgtcggggacaataatcttctgcccactgcgggtatcggtaatatattgcagataagtgacttgagattttacgcgctgcacatcggaaggacgggcatggacaaaaagcagattatgaacgaccggaaccagagcacggacttttttccctttttttatacatatcttgtattgcataggaatgaaacagcccaaattttctttcttgagcagatgcatggcatccggttctctgcggtaggtggcacgcatagcataccagatttcgacctctttctctattcccatttttatgcttttgttcagacaagggtgttctcctggggctttaaattccttgcatacacttggaattcaatcacttgcggacactttatgtagaatacgacaagctttatgcccttcttgtcaacagattttttgcagtcattcattacctaacaggtaaaatgctgtaaacgaatctattgcaagcaaaaagcgttcaatagacgttcgtttaatgaacgcaaagataacgtgtatttttgaatctcgcaaaatgtttaataaaaatattctataaatttctttttagtgagtataatactttgtcagtaagcctgttgcattgtatttctctaacttcttccttttactaatttttaagtaatcttccctctttaattttcttaaatattgacgttcaaaaaacgaacgtttaaaaaacgccttttccaaacgcaatatttcactgtataacaaccaattacaaccaaataaaaaatatcgtgtttatagaaatcagatttccacaaacacgatatcaattaaaaaagaaattactattctcagaagttaaatatacccaattccgggaaagtagccccttgcactgcaaaacagattccgaagcaagccgcacttacaatccaaaggataaccagcgtccacttcaaaccggagttcatcggctgccacttgaatatctggctaaagatggcccacacaaggctgaccaaaggaattcctaccaacaagatacctgcaatgtacatcacaatggcagacagcggagaagtaggcagtaccacatcagccatcgggaaaagggaaatgagagctgcaccaccaccaacagccaccgctatcgcagcaaacaacaacgccacaaataccactccaaatacaaacagtaccggactgcagataatggcaaatatcaccagacagattttcaagaaccagccgacaatcatcaccaatgcatctcccaacttctgcaagaaagtacggggtttgtccgacctcatataatcattcaccccattggcaaccttctcaaaaccgtccgtcaccgtctttccgatattctctaccgtaacggcctcgccacgcatactcaacttctcggctgctgtgcgggcttccggtataaccagccaacacacgatatagaccggtatcaatgtccctaccccacaaatcaagatgacaagcagtaacagtcgaagtaaagttacatcccatcccaggtaggcagccattccactgatgacaccacccagcattttgtcatccggattgcggtatagacgacggcgtgtagtgccataagcggtattgctgttccaagcaccggcaccatagccgcccccggcactcgtgctgccggaatcggcactagcactctctccttccgcctccatatcttccggctttcccatgcgggcaatcacctcttccacatcggctatcgtgattacttgtgaaccggccgacaatttctcggcaaagagttcggaaatacggcgttcaatatcatctacaatctcgtcggcaccggcctccttgcggaagtgcatcttgagattactcagataattatccaaaagacggtatgcgtcatcatcaatattgaaaacggttccacctaaatttacagttaatgtctttttcataacacattatttatttacaatttgactatttacgatttactatttaccattcggcgaatgcagcatattctctgtggtcatttcaagaattgctgatgtgattcaccgtctcgttcaactctttccaggacatttccagttcaccgagaaagacttctcctttttccgtcaaccggtaatacttacgtggaggaccttgcgtagactcaatccattcataacccagcaagtcgtcgttcttcagacgggtgagcaacggataaagtgtaccttccactacaatcagtctggcttctttcaacttctgaatgatatccgaagcgtaagccggctccttgtgaagcagcagcatgatgcaatattcaagcatgcccttgcgcatttgcgactttacattgtttacatccataatggtatttactatttgacaatttacgatttactatttggctgcgcaatagagtaatgagtgtcctcattcattctattgttgttccttgtatggcacaaatatatgtgttacatcagtaccttgcattacaaagtaccttatattaaatattattaacaagaaaagtagttcacgctactctataacatcagtaacgtgaacagagaggaagaggtatatttaccgatggataacaattttatccaatataccggtcagactcgcaattgctactccgtagttggttatggggatgtgctgtgcgcgggcatgggctatacgattgagaacgtacttccggttgaacatgcaagcgccgcaatggataattaaatcatatcgggacaagtctttgggaaagtcatttccagatacaaagtctatctgcaattcctcgccgatgcgctttcgtaacaggcggggaattttgacggtgccgatgtcctcggtcagcggggcgtgggtgcaggcttcggctatcagtacacgcgattggggtgtcaggctatgaatagcggcagctccctctacaaaggcattgatgtctcctttgtaaccggcaaaaagaaccgagaaggaagtaagactactctcggcaggcttttgttgatagacgatggggaacacctgagagtctgtgattatcagcttaggcggacggacaagggcttgcagggaggcttgcagcttgtcggtggtgcagctcatcactaagcactttttatccaacagttcgcggatggtctgcacttgcggaagaatgagacgacctttgggggcttgtatatcctggggcatcaccagcaggacgacatctccttcacgcaccaaatcgcccgtgatagtctgctcaccaaaattctcgggaagcttttcgaggatagcatcgaagataccttgaatgccggtaccctctttggcactgaccacaacgggagcctgcccgcactccttttcaatccgaagcaccacggaagcggtgtcttgacgggaatcggctttattcagtatcagtatcacggggatttcgcgcgctgccagcagctttagccattgctgttccagcgttccgtcagcttcataaagcaagagggcgatgtccgctttctccaccgtctttaaggtacgctccacgcgcataccgcccagttcgccttcgtcgtcatcaaaaccgggggtatcgataaagaggcacgggcccaaaggatatacttccatggctttggtcacggggtcggtagtagtgccgggcgttgcggataccaatgccgtgtcttgcccggtcaaggcattgacaaggctggactttccgctgttccgtcgtccaaagacggcaatgtgcaggcggttggaacgaggtgtattattcataaatccgaaatctaaaatctaaagtctcttttcccctcccctatctcctgaagattacgttcggctatcgcccgtatcttggggttcgggatatgctccatctcctcacgaatcagccgcatgcccttctccttggtttcggaggaggcatagtcctccagatattcttttaatgtcatcagtgcattgggctggcagcagtttgctatctgtccgcgcttgacgagcgacatgaagcggtctccggtacgtccctcgcggtagcaggcggtgcagaagctggggatatgccccaggtcgagcagccagctcaccacttcatccagcgtgcgccggtcgctcacatcgaattgggaggaatcttcctctttggcttccggcacggcataacctcctacgctggtgcgtgaaccgccgcttatctgcgaaacacccagttcgagtacccgacggcgtacggcttccgactcacgggtggaaataatcattcccgtataaggcaccgcaatgcgggtaaccgccacaatacggcagaacatctcatccgagatggcatcaggaaaatcctcggtcgaaatatcatctgccggacagatacgcggcacgctgatggtatgcggacccacgccaaaggtagcttccagatgttcggcatgcatcagcaatcctacgaagtcgtaacgataggtattcagaccgaacaatacaccgatacctacatcgtcgatgccaccctccatagcgcggtccatcgcttcggtgtggtaggcataattacttttcggtcccgtgggatgcaaggcttcgtaatgctctttgctgtaagtctcctgaaaaagtatataggtaccgatgccagcctccttcagcagccggtagttctccactgtagtggcggctatgttgacattcacccggcggatggccccattcttgtgatgaatgctgtagatggtgcggatggactctaaaatatagtcgatagggttgtttcgagggtcttctccggcttccagcgccaggcgtttatgtcccatgtcctgcaaggcgataacctcgcggcgtatctcctcttgcgagagtttcttgcgggagatggtacggttcttggcatgatacgggcaatagacgcagccgttcacgcaatagttggaaaggtaaagcggggcaaacatcacgatacggttgccatagaatttttgtttgatttcgcgtgccagatggaagatgcgctccaccagttccggctcgtcacattccagcagcagggccgcctcccgatgggaaagcccctggcacaaagcagccttgtcaatcaaactttcgatgagcggacggttgttgcggtttgcctgcgcatactccaatgtatccaatatctcctggtgattgatgaattcttctgcttgtcttgactttatgttatacacttcgtaaattgataattggtaattaaaataaagaatgaagatttgaaaattatcaattatcaacggtcaattctccattctcataatctcctctctctcttgatacctcgtagcctatccctttcagttgttcctccaattttagcaaaccttctgccgcttcggcacccgcagaagctttgttatcatagagggagtacttcgcccgctgatgagaaggcgaaagattaggcatcacgacattggcgccagccaatattccccgttcccgtccgtccggagcaagtgtggccagggcagtggtagcaggtatcagtgccgcgggatgcatcaaccggaagatagaaagcaacttcaacgtcaactccatatctcccggcggaaaagaggcaaacggagtatcgtgatgcggaagaaaaggtcccattcctatcatctccggctgaaaccgttcgatgaagagaatgtcttctaccaaatggtccaccgtctgataaggactgcccaccatgattccggttcccacttgatagcctatctctttcagccagtccaagcattgcaaccgatgggaaagagacatctccgcaggatgaagccggtgataatgcccttcgttgcaggtttcgtgccgcaacagatagcggttggcacctgccaggaagaaacgttcgtaggcttcccgcgatttctcgcccaaggataaggtaatggcacaatccgggaaggattgccggatggcggcaactgtctccaccatcccctcatccttcaccgccggcgcttcgcccccttgcagcacaaaggtacggaagcccaaccgatagccttcatggcaacacgaaagaatctcctcctgcgtcagctcataacggactatgttccggttctccttccgtatgccgcaatagtagcagttattgcggcaacggttggttatctcaatcagtccgcgaatgaagattttattgccaaagcgagcaagcgcttcttcccgggcaagcccttgcaggtaggctgcaagggctgtgtcccgacaaagaagcaaggctttatactcttcggcatccagcctgcgattgctccgcagtttgtcaatcaaatgcttcatataaacggacaaagggctaatacgtctcttttctctttgccaactcctgcgtcagctggcgctttccggcagttatttcattatgcgaacatggcccggtaatacaaccgccctcgcaagccatcacttcaataaattgccccggagccttgcccgacttggcgtaagcacgcaacgcaccgatagccttcttatccagattagccacttgtacggcattgattttatctgcctcttccttcagataggctttcacggcacccatcacgcctcctgcctgcgcaaaaccatgcgcctcgcgcacggaagtgaaactcatggaatagggctttgcctgctccatctgaatatccagcccggcaagcacggaagccacctcctcgaaagtcatgataaagtccaccgcctcgtcgcgctgcgcctctttgcgcttggcaacgcaaggacctatgaagaccaccttcgcatccggatacttctctttagcaatgcgggcagcataatacattggcgaaccggtgcccgacacgtaaggcttcatggcaggaatatgcttgttcaccaactctatataagacggacaacaggaagtcgtcataaacttctgaccctcctccagcttctcaatcagctcgtgcgcctcgttgctgacggtatccatcgcaccctgagccacctcaatgacatccgtaaaaccgacttgtttcaatgcgccatatacttgttcaatagtcgtcttgaactgccccaggatggacggagccacgatagccaccacctgctcacccttgcggattctgtgcaacacgtcgaacacctgcgatatttcgaaaattgctccgaatggacatgcattgagacactttccgcaatagatacatttgctttcgtcaatatgctctatccccttctcatccttactgatggctttcacgggacaagcttcctcacaaggtacgggaatataaacaatggcatggtagggacaactcttatggcagatgccgcaactgatacatgcatcatggtcaatccatgcctgaccgctctccttgacatgcactgccttcttgggacaattcacctggcaactgcgtgccgtacatccgcggcagaggttcgtaatctcgtagttaatctgcacacatgccgaacaagcttcgtcaatcacacacatgatgttgtctttcggcctgccattttccgctctgtccagtgcacgggcagcgtactccgacaagggggtcagctcatccgtctcgtcctccatatcgagtcccagaagcggcaatgacttgtacttccacaccgcgcgctctttgtgcacacagcagcgtcccgcgtgcttggacctcttcggactcagctcgatgggcagccggtctattttatccacaagttcgttgttattccacaactttaccagttccttcagtaatctgtggcggacaatcataatgttgctcgtaaatgccataatttttaaaatcaaaattagttagttcggtaacggtctgcaaagataacgattgtttcacaaaaaaggcttaactttacaccccaaacagtataaatacaaccgatatgtttaccataagaaaagcaacgacagcagactgcgcactgattcagaaacttgcgcagcaaatattccccgtcacgtataaggatatccttactcccgaacagaccgactacatgatggaatggatgtattcattggacaatatccgcaagcaaatggaagaggaaggccacgtctacttcctggcctacgaagaatgtgaagcggcgggctatgtgtccgtacagcagcaaggagaagatttattccacctgcaaaagatttatgtgctcccctattaccagggtgcacattgcggcagtttcctctttcgagaagccatcaagtacatcaaggaagtacatcccggcccttgtctgatggaattgaatgtaaaccgcaacaacaaggcactgcagttttacgaacatatgggaatgcgaaaactccgtgaaggggatttcccgataggaaacggatattacatgaatgactacatcatgggactggaaatctgagtcccggcattaaaagccctccaaaaactaaaggctgcgcagttcattacgaacattgcgcagcctttagttttatctttcgtttccgattacttcgccaccttttcaagccatttcagcatgaacagcatggtgaacatggaaatgcagcacgctactacaaataccgtccacgtcatccagataggaatactttcgtagaggatagcaccgataacgagcaactgattaccaatggcagtagcaccgagccaaccgccctgcatgataccctgatatttgggaggagccaccttggatacgaatgaaatgcccaacggagaaatgtacaactcggcaacagtcaatatcagataggtaaccatcagcaacagcggagtcaccttcaccggagaggtacccaaagcgataatatccttgtgcatcggcaagttgcttacataagaaccgatagccattataaggaagccagtggcagcaatacccataccgatggcaatcttccgcggagtggaaggctctttacccttggcacgctgtgctgcaaagacagccatgatgaccggagtgagagacacaacgaaaatcgggttcaaagactggaacagctcagctgaaatagccatgccgaacaaattcaaatctgtatattccttggcaaaataagtcagtgtcaatccattctgatggaacgagaaccagaagaaaattaccacaccgaatacggcaaacaatgcatacatgcgctgtcttacctcttgtgcattcatctccactgcagtggcatcgcccgcttttgcagcaaccttcttgctgggatcggggaatttctttctgttgatgacgaaaattaccaaagagagaaccatagccaggatagctacaccgaatgcataatggaaaccagtggtgaacacgttcagatattcattggcaaataccgtcatatccgttacgggtgttccggaaatagtggctttggctgccaatgcgctataagtgtccacagcctcgggagtcagcgttcctgccagatgtccgtggcaaagggcaggcaggtcggcatcataattgtagccgaatgtggacaaccaccagttacgcacgcctactgcggcaaacggggcaaagatggcacctacattgatgaacatatagaataaggagaaaccggaatcgcgcatgctggagtactgaggattgtcgtacatctgccctacgagcgcttgaagatttcccttgaaaagaccatttccgaaagcaatgacaaacaaggctgcacaagtaatcaccagaaacaaggtcttattggcaaccggtgtaggagacgggatggccagcatcaagtaacctaccgccatcaaaacaataccggcaaagatggtacctttgtaattacgggttctgtcggcaataataccacctatcaatgctagaatgtaaatagaaaaataaaatgttgagtagatcaaacctgcctcttttccatccagtccgaacttggcttgcagaaaaagtacaagaatggccatcatggtataaaagccgaaacgctcgcccaaattagcaaaagatgcggcaatcagacctttagggtgtttgttgaacataaaaattagtttttagaattagtaattggattgatttcttgaataattcctgcaaatatataaattctattgaagatttccttataaaattaaaatatctcggcagaaatagaagatttattcattaaaaagaatacaaacctctgcatgcacttcccttaccaaatccttcggatccaacttaagctgcaaaccgcgttgtccggcactgatatagatatacggaaaccgcaggcacgtttcatggatataggtagggaaaggtttcttcatgccgatgggtgaacacccaccccggatatagccagtcagaggtaaaagttccttaaccgggataaggtcacattttttgtttcctgacgcttttgccgccagcttcaaatccacttcgtgctcacccgggatgacacagacaaaataaccggatttatcaccgtgaagaatcagcgtcttgaacacgcaattgatgtcctcacccaaactggcagctacatgcactgcacttaagtcgttctcatccacctcgtagggaatgagctcatacgcaatcttggccttgtcgagaagccttgctgcattcgtcttattgattttcataatattctctatgatgagataattatcacttgatattcaattcttcacgcaggaacttaggcgtatagcctttcttgcttttagcaacctcttccggggttccgcaggaaaggagttctccccctcccttaccgccttctggccccatatcgatgatatagtccgccatcttgatgacatcgagattatgctctatgacgatgacggtattccctttgtctacaagtttgttcaacacgttcatcaaaacgcggatatcttcgaaatgaagtccggtagtaggttcgtcaaggatatacagagtcttgcccgtatcacgtttggaaagttccgtagccaacttcacgcgctggctctcacctccggagagcgtggtggaagactggcccaacttgatataacccaatcccacttcctggataaccttaattttgttcaatatctgaggcacattctcgaaaaactccaccgcacggttgatggtcatatccagcacatcggcaatggattttcccttaaaacgcacttccagcgtctctcggttgtaacgcttgccgtgacatacctcgcaaggcacatacacatccggcaggaaattcatctcaatgcacttgtacccattgccttggcaagcttcgcagcgtccgccactgacgttgaaggagaagcgtcccgccttatatccacgtatcttcgcttcgggcaagccgacaaacagattgcggatatcggaaaacacaccggtataagtggcaggattggaacgcggcgttcgtcccaaaggagactggtccacattcaccaccttgtctatatattccagcccttcaatactatcatagtccaaaggatcctgcagtgaacgatagaacttctgcgaaagaataggctgcaacgtctcgttgataagcgtggacttgccactgccggaaacaccggtaacgcaaatcagcttgcccagcgggaactccacatccacatccttcagattattacccttggcgccacgcagccacagactgtgtccattgccctcgcgacgcttggcaggcacctcaatggcacgctcaccattcaagtattgggaagtcagcgtatgcgtccgtagcatttcacggggagtaccggcaaagacaacatcccctcccagcctaccggctttcggccccatatcaatgacataatcggcggcgagcatcatatccttgtcatgctccaccacaatgacggagttgccaatgtcacgcagttccttcaaagagtgtatcaagcgctggttgtcgcgttggtgcaggccgatactcggctcatccaatatatacagcacattcaccagctgtgaacctatctgcgtagccaggcggatacgctggctttcaccaccggaaaggctgacggaactacggttcagcgaaagataatccagacctacatcaagcagaaatttgagccgtgtacggatttccttcaggatttcaccggcaatctgctgttgcttgctactaagatacgggtctacgtttaccagccagtcatacagttcattgatgtccatcgtagacaattcgtagatgttcttgtcgtgaatgcggaatgaaagcgcttccttattcaacttggcgccatgacactccggacaaacggcagtcttggcaaactggtccgcccacttctgtgccgtggcagaagcatccttctcctgcagcatctggatatactttacaaccccctcaaacgtcacaaaataatcagaagaggtgcctatcagtgaactctttatcttgatacgctcgtccgagccatagagaatctcgtcgatggcatcctccggtaagtctttgaccggtgttttcagcgttgcttcatatttctccagcaaggcggtaatctgccagaaaatcatgctgttcttggctttccccaacggtgcgatggcacctccggcaatggagagctcacggtcgggaatcaccttgtcaatatcaatctggctgaccacccccaaccctttgcatttaggacatgcaccttgcggcgaattgaaggaaaagttgtgcggcgccggttcccgataggacaaccccgtcacgggacacatcagccgtttgctgtaatggcgcacgctatccgtctgcacatcgagtatcatcagcaatccgtcaccttggcgcatggcagtggccacgctgttcttcaggcgtgtgtcatccttgtccgtcaccaccagcttgtctatcaccacctccacatcatggttcttatagcggtccagcttcatgcctggcaaggcttcgcacacctcaccatccacacgtacgtagagatagcctttcttgcgcacctgctcgaagagctccttgtaatgccccttacggctgcgcaccagtggagcaaggatataaatgcgttttcctttgtaatccttcaggataagatcgagtatctgttcctcggtatacttcaccatcttctcgccggagagataagaataagcctctcctgcacgggcatacaacaaacgaaggtaatcataaacctctgtcgttgtacccaccgtggaacgtggattcttattcgtggttttctgctcgatggagataaccggactcagtcccgttatcttatccacgtccggacgttccaaatttcccaggaagttacgggcataggctgaaaaggtctcgatatagcggcgctgcccttcggcaaaaatagtatcgaatgccaaagaggacttgccgcttccgctcaggcctgtaatcacagtcaggctgttacggggaatctcggcatcgatattcttgaggttgtgcacgcgcgcaccatatacattgatatattctgtttcttcttgcatgttgatttatcctatcgttttaactgcaaaaataactgtttccccccgaatatcagccgaaaagcgctatttttcagttttgaaatgcacaatattatttcttaacgcaatcctttggtttgaatgccacaatattcgtacctttgcagctactttgggaaattgtaaacataaaccaacgattactgaatgaaaacgattaaccgcattatctgctccctgctgcttgccagtgcatgcagtatcggtgcaatagcacaagagaatcaatcttattttctgcatactatcgaaaaaggacaaagtctctactccatcgccagcatgtacggcgtcagccagtcggacatcatcaaactgaaccccggcagtgacgagaaaatattcatcggacgcacattgcgtattccacgcagcgctgccaacatacaaaaagaaacataccataccatcgaaaccggtgagaccctctaccggctgaccgtgaaatacaatgtatctgccaaagccatctgtgacgccaacccgggactgagcgccgagaatttccgtatcggacaagtaatccgtatcccttccacaaccgagacccaaaccatggtcccggctgagacacaaagcagcactgtagttgccaacaacaatattctcggccccgtagagtcacgatgccgtgacatgcataaagtgaagcggaaagaaaccgtattcagcatcagccgtgaatacggcatcagcgaagccgaactgatagccgccaacccggaattaaaaggcgaaaacaaaataaagaagggaaccttcctctgcattccctatcccaaagcacagacggagcaaaatatccagtcgcaggcaatacctaccgacagcgagctgttccgtgaaaaccggaaaaagacagaacgcttcagcaccatcaaggctgccgtcatccttcccttcctggacggggtatcaaagagcgagtcttcccgtatggtggaatactacgaaggcctgctgatggccgtagacagcttgaaacgtactggcacttccattgacttgtacacttacaattctggtcccgaaagtgcctcgctgaactccatcctgggcaaaagcgagatgaaagacatggacatcatcttcgggcctctgtaccaacagcacatcaaacctctggccgagtttgccaagaaacaagacacacgcctggtgataccattcacatcgaaagacaacacggtattccagaatccgacggtctatcagataaataccccccaatcctatctgtactccgaggtgtacgaccactttgtgcgccagttccccaatgccaacgtcatcttcattgaagccagccagggcaccaaggacaaggcagaattcatcaagggactgaaagatgaactgcgcaaccgttccatcccgatgaagagcctgaaagaggatgtcaccgtagaatccctgaaaacagtattacgcacggaccgtgagaatatctttatccccacatccggcagtaacctgacattgattaagatacttccccaattaaccttattggtgcgcgaacaacccgaaagccgtatccatctgttcggctatccggaatggcagacctacaccaaagaccacttggaagccttctttgaactggacacctatttctattcctctttctataccaacaacctgctgcctgccgccatcaactttaccaaaaactaccgcagatggtatggcaaggagatggacgagcgctatcccaaattcggaatgctgggcttcgataccggttatttcttcctgaaaggacttgcgcgctatggctcttctttcgagaagaacatgcagggactggatttgattcccatccagaccggcttcaagttccaacgggtaaacaactggggaggcttcatcaacaagaaggtgttcttcgtgcacttcaccaagaactttgagctggtgaagttggactttgattagggattaaggattaataatctgataatccactatataactattaacttgtagcttgtaacttataacttataacatgaacctgagaacaatcatcatattcgccctgctggtgtgtgcatgtatattgcccctgcatgcgcaggtgggcgagcaacgccacaacttcgctgtgggcgtcaatggaggcatcaatctgaatagcgtaagcttctctccctctgtcaagcagaagaatctgatgggtatcaacggcggtgtaacagcccgatacatttccgaaaaatacttcagtatgatttgcggtgcacaaatcgagctgaacttctcacaacacggttgggacgagtattacgaggactatcccacactgagctacacccgcaccatgaactatgtggaaataccgttcctggcacatctggcattcggcaaggaccgcggtttgcaattcttcatccatgccggtccgcagataggtttcctgcttggcgacagcgaaaaaatagacggcgactgggacggcactgtagcagaatcctacaccaacatcaccgtggaacagcacggcaaggccatagacaacaaattcgactacggcattgtaggcggagcaggcatagagctgcgcaccaaggcaggcaatttcatcgtagaaggaagatactactatgctttatccgatttctatggcagcaccaagaaagactttttctcacgctccgcacacggagtcattacggccaagataacttatctcttcgacttgaagaagtaatgcttataggaaacacccgtttccacacgtagggacgacaatttcctctaatgggaacagtataatggaacgactgtaacctcaagcggaaacgataaaaaagcagaccacgtattccgaatgaaatacgtggtctgctttttgttattatcaagtagataaaccttcttatcttcttaaacggtctgccgccttcaccatcacctcatctttgtagatggcacggaaggccagatagttgaggatgatggctaccaccggaaggcaaagcgcccatcccaactggaaagtcattgcatccaaatcacccttcaaaataaacataaatacacagaaggctatgtagtagcctatcagcagaatgctgctgaaaatcgtcatgcgtatttgcaacatacggttacggaaaaggaatatcgtacagaaggcaacaagtgcactgagcaacaatatcccgaacaagccccaagtagactgaaatcctccgtcggccaaagccactcccagaggtttgaaaacatgcgctgtcactccgtccgatccgatgaactgtcctacaggcatgcaaattgccacaaccaacaggatagttaccaacaacaaataaacagattgaatacgttgtatcattactgtaatttttctttttccttagccgggttacgatagtaaatcttaccctccacatattcttgcgttgcaatcaatgtcggcttcggcagtttttcgtaatagcgggaaatctcaatctgttcccggttttcgaacacttcttccaaattatcattgtaagaggcaaactcagcaagctttttggaaaggtcattcttgatttccacactaatctggttggcacgctttccgataatcgctacgctttcgtatacattaccggtatcctcacacaactccatcatatcacgggtcaccgtagttgtaggagcatttgtctttctgtaatccataaatttatctatagtattaattacaaattattaattactcttgttcttcacctccctcgcccagcattttctgtgactccttgaagattcggtcggcttccttcgtatacttgctttcagggaattcgtttttaaaggcataacattcatccaccgcttcacggtaacgttcggctcttctatcttccacactatacactgccaattcatacttggcacgcaagataagaatggacaagtcttcacgcaggttggtataaggataatccttcaaggcattctgggcggtgatgacgcaagcctgatagttgttgcccagataattacccatgttatagtaaagctttgcagacagatactctttcattaccagcttgtcctgcaaggcaaatatcatgttctgcgcttcttctttcttggaactttgcgggaagtattccataaacatctgcaactgctggatggcgctatacgtaccggattggtccaaacgcggctccggagtatccagatacaaggctttaccggcatggaaacgtgccagttcggtgaatgtgccgcggggataaacgttgtagtattgaatgaaagtctgcgcagcagtctgataatccttctggttatagtaactcatgcccaacatatagagggattcctctgccttatcagtacctttgagaatggcaatcaattcgttgagcaaagtggcagcacggttgtactggccttttgcgaagtaattttttgccgcttcgtacttgtattcgtaatctgtgcttttcagcaatttgttgtattctccacacgaggagagcagcaatgctgcaagcagagttattaggatgttcttcttcattacttttgttcaaataatgcgcaaagataggggttcgcatcgaataaagcaacgatacgagccttaatttttcaaaaaccagacgaacgggcaggaattagggatgaatggtgaaagattagggatgaggactatgcaggttgatagcacagtcactaatcactaatccctaatccttcctccctaatccttcgttttcacagtttatagagttcgcttgccgccagcaaatcgacctttttttctgtcaatacacggatacagttatccatgtcgttgggacgaatgatgacattggccgtttcaccattggcaaaggaatacatgtactcgatgaacacgccttcatcggagaggaaacggagtactttcgccaatgaaccggggatattgggacaactgatgcctactacatccgttacgttcactgcgaagtgattatctttcaaagccttatatgctttatccggttcggaaacaatgccacgaaggataccgaaatcggcattctctgcaatacatagagcagaaaggttgacaccttcttttgcaagaacttcagtcacctctgtgaggcgaccggacttgttctccagaaaaatggaaagttgttttgctaccataggtttatttacgatttgacaatttacgatttaccatgtacaatgtacaatttggcgatttacaatttgcggttgtcgataacgcgcttggctttacctacgctgcgctcaatactgcgtggttctaccaaacggacatctacgccgagaccgagtacgctctgcaggcgggccacaagcttcttcttcagagccagcatcttgttgatttcgtcggaatagtattcgggacgaacttcaacctgcaactccatggtgtcggtattgttcttgcggtctaccagcaagaggtagtgaggttcgaactccggcatttcgaggataacggactctatctgcgtggggaacacgttgacaccacggataatcagcatgtcatcactacgtcccaagatgcggtccatacgaaccagtgtacgtccgcaggagcacttatcgtagtgcagggcggtgaggtccttggtacggtagcgcaacagcggcatcccctctttggtaaggtgagtgaacaccaattcgccggtttctccaggggcaaccggttcgagggtcttcgggtctacaatctcggggaagtaatggtcttcattgaggtgggtaccgtgctggcactcgcattcgtaacctacaccgggaccggcaatctcactaagcccataaatatcaaatgccttgatacccagcttggtttcaatatcccgacgcatactttcggtccacggctcggcgccgaaggctcccactttcaacttaaactcttcacggggaagaccggagtctttgatggcatctgccagatagagggcgtatgagggcgtgcagcaaagtacggtagaaccgaaatcatgcatcagtgtaatctgcttctccgtattgccgctggacatcgggatgacggaagcgccgatattctcggcaccggcatgcgcacccattccgccggtaaaaagtccgtaaccgtaggacacctggaaaatatccgagctaccggcaccataggcggtaaaggcccgtgaaaggcattcggaccatgctgaaaggtcttttcgggtatagcctaccacagtgggttttccggttgtgccggaagaggcatgaatacgcacaatctggctcataggtacggcacagaggccgaagggataattgtcccgcaagtcgtacttggtagtaaaaggcagttttacaatatcatctatactgtttatgtcatcgggagtaactcccagttcctgcattttcttacgataaaaaggagtgtcatgatacacacgctccacagtctttttgagacgaatgctctggattttacgaaggctttcgcgctccatgcattcgatgctttcattccaaatcatgttcttcgttgtattacaattattaatggttgttatcaatatagctgcaaagtaaacaaaaaaattttgtttatctcaaagattttaccgaatattgccgcttctaagaagagaaaatgaacaaattcgaactgacatccgcctaccaacctaccggtgaccagccggaagccatcgcacagctgaccgagggcgtgcatgagggacttcctgcacaaacattactcggtgtcaccgggtccggaaagacattcaccatagccaacgtcattgccaacatcaacaagccaacgctgatattgagccacaacaagacgctggctgcccagttgtacagcgagttcaagggattcttcccgaacaatgccgtagaatactatgtgtcctactacgactactatcagcccgaagcctacctgccatcatcggacacctatatagaaaaagacctcgccatcaacgacgagatagacaagttgcgccttgccgccacctctgccctgctttcgggcaggaaagatgtagtggtggtatcctccgtttcgtgcatatacggcatggggaatccggcagacttctacaacaacgtcatcgaagtacagcaaggcaagaatttcagtcgcaatgtcttcctgcgacgcttggtggacagtctttatgtacgcaacgacattgacctgaaccgcggcaatttccgcgtgaaaggcgatacggtggacatttatctggcttacgccgacaacttgctgcgcgtcaccttttggggagacgaggtagacagtattgaggaagtggaccctatgagcggcgttaccgtcgccaagttcgatgcctacaagatttatcccgccaacctcttcatgaccaccaaggaagccacgttgcgtgccatacacgaaatagaggatgaccttcacaagcaggtgcaatggtttgaaaacgaaggccgcccattcgaggccaaacgcttgcaggaacgggtgacctatgatatggaaatgatacgcgaattgggacattgctccggcattgagaattattctcgctactttgacgggcgtgctgccggtacccgcccctactgcctgctggacttcttccccgaagatttcctgatagtcattgacgaaagccacgtcagcgtcccgcagatacgtgccatgtacggaggtgaccgcgcccgcaagataaacctggtggagtacggattccgcctaccggctgccatggacaaccgcccgctgaaattcgatgaattcgaagagatggccaaacaagtgatttacgtcagcgccacaccggcagactatgagctgatgaaatccgaaggcatcgtagtagaacaagtcatccgcccgacgggactgttagaccccattattgaggtgcgtcccagccacaaccaaatagacgacctgatggaagaaatccaagtacgcatcgagaagaacgagcgtaccctcgtcaccaccctcaccaaacgaatggctgaagaactgacggaatatctgctgaacaacaacgtgaagtgtaattatatccacagcgacgtagacactttggaacgtgtgaagattatgggtgacttgcgcgagggcgtttacgatgtacttgttggtgtcaacctgctgcgtgaaggactcgacctgcctgaagtctctctcgttgccattctcgatgcagacaaggaaggtttccttcgttcccaccgctcactgacacagactgccggacgtgccgctcgtaacgtgaacggtatggtcatcatgtatgccgacaaaataacggacagcatgcaactgaccatcgacgagaccaaccgccgtcgcgagaagcagttgaagtacaacgaagagcacggcatcacaccacagcaaatcaagaaagccaagaacctcaatgtgtttgccaccaacgaggcttccggcgaagccgtcctcagcagcgagaagttcacttccagcactccccgcccctatgtggaacaagaaagtacatctacgatggctgccgaccctatagtacagtacatgagccgcaagcaactggaaaagagtatcgaacgtaccaagaagcttatgcaggaggctgccaagaaactcgattttatcgaagccgcacagtatcgggacgaggtgctgaagatggaggaattgctgaaagaaaaagacgagtaagggatttcacctctttttctcaaactatactcccctccttttgttattctatgaaacagagtattaattcataaagacaaaagcgagatgaataaaccaataaagacaatagctgttgcactggctgccatagcctccatgagtgtgcaacaaacagaagcgtgtacccgagccacctacatcggtcctgacaatacagtcattacaggacgtacgatggactggaaagaagaccttatgagtaacatctatgtattcccacgaggcatgcaaagggcaggctacaacaaagggaatgcagtgaactggacttccaagtacggtagcgtcattgccgccggttatgacataggtacctgcgacggtatgaacgagaaaggtctggttgccagcctgctcttccttccggagtccgtttaccaccgcccgggagacaaccgcccgattatgggcatcagtatctggacgcaatacgtactcgacaattttgcaaccgtacgcgaagctgtggatgaactgaaaaaagaatccttccgcattgatgcaccagacctgcccaacggagccgcttccaccctgcatctggccatcacagatgaaaccggaaacacggctatcctggaatacatagacggaaaccttgagatacatgaaggcaagcagtatcaagtaatgaccaactctcccaaatatgaactccagctggctatcaacgactattggaaagaggtaggcggactgaatatgttgccgggaaccaaccgctccagtgaccgctttgtacgcgcatcgttctacatcaatgccattccgcaaacagcggatgcaaagattgctgtacccagtgtattgagcgtaatgcgcaatgtttctgtaccgttcggtatcaccacaccggacaagccccatatctcctccacccgttggcgttctgtatccgaccagaagaacaaagtatattattttgagtccacactgacccctaacttgttctggctcgacctgaagaaaatcgattttagcccgaatgcaggaatcaagaaactctcactgacaaacggagaaatctatgccggagatgccataaaggatttgaaagacagcaaaggatttgtatttcttttccagacgccggtaatgtagcacagcccctacacatagcccctcaataatggatgcttcccacttctttctataagagaaagcagggaagcatttatttttctcattatttttgtgtacgtttgcagatacatactcaatgcagcaatttacatggaattattagtatacaaagcctctgccggctcaggcaagacctttacgctggctgtggaatacatcaagcatttgataatcaatccacgcgcctaccggcagatacttgccgtaaccttcaccaacaaggctacggcagagatgaaggagcgcatactgacacagctttacggtatctggaagggagcaccttcttccgaagcatacttggagagaattaaaaattataaattaaaaattaaagaagaaggcggggacagattgacggacggggagattcgtcaacgggccggcatggcactgcaatacatgctgcatgactacagccgtttccgcgtggaaaccatcgactccttttttcaatctgtgatgcgcaaccttgcccgcgaactggaactgagtcctaacctgaacatagagctgaacaacagtgaagtgctgagtgatgccgtagacagcctcatcgagaagcttacccccacttctcccgtgctggcatggctgctggactacatcgacgagcgcatccgcgacgacaaacgctggaacgtatcgaatgaggtgaaaagtttcggacgaaacatcttcgatgaaagttacatagaacgcggcgaaaagctacgacaatgcctgcgtactccgaatacgctgaaactctaccgggatgtgttgcgcgatatggagaccgaagctctggagcagatgaaaagcttctacgaccagtttgaaggcgaactggaagggcatgccctcactcccgaagacttgaaaggaggtgcccgaggcatcggcagttacttccgcaaactgcgcgacggcagactgtctgacaaggatgtgctgaacgccaccctgcaaaacagcttggcagatgcaaaaaactgggcaacgaaaacatcctcacggaaggacgacatcatctgtctggcagaaaccagcctgatgcctctactgcaggaagccgaaagaatgcgtccgcaacgcaaccgtaccttgaacagttgccgcctctcgctccagcacctcaacaaactgcaacttctcaatcatatcgacgaagaggtacgcacgctaaaccgggagcacaaccgctttctgctctcggataccaacgccctactgcacaaactggtgcgcgagggtgactcttcgttcgtcttcgagaaaatcggcgccaacatacgcaacgtcatgattgacgagttccaggacaccagccgcatgcaatgggacaacttccgcctgctgctgctcgaaggactttcgcaaggagccgacagtctgattgtgggagatgtgaagcagtccatctaccgctggcggaacggggactggggaatactgaatagtttaggcaatgaagaattgaaaatggagaatagagaatcaagttctccattaaacaacttccccgtccgtgtggaaaccctaaaaacaaaccgacgtagcgaaactaacattatccgtttcaacaaccaagtatttaccgctgccatagactacctcaatgcgctacacctgaacgaactgaaagaggactgcctacccctaaaacgcgcttatgccgacgtagtgcaggaatcgcccaagaacacggagtacggctacgtaaaagctgccttccttgaaccggacgatgaacacaactatacagagcagacccttctcgccttaggagaagaagtacagcggctactggaagagggcgtaacactgaatgacatcaccatccttgtccgcaagaacaagaatatcccaccgatagccgactatttcgacaaagaactgcatctctctgtcgtgtccgacgaagctttccgtctggatgcctcccttgccatctgcatgctgatggatgccctgcgctgcctatcgaatccggagaacaggattgcggaggctgcactgatggagaattacaaattacaaatgacaaatgacgagcaaccgaaattcacaacagccactccccttcccgaagcctttacctcccgacgggaaacgctgcgcctgatgcctttgtatgagttactggaagaactgttcagcatcttcggcatgagccgcattgaaaagcaggatgcctacctcttctccttcttcgatgctgtgacggagtatctgcaaagcaattcttccgaactggacagcttcatccgctactgggacgaaaccctttgcagcaaaaccatccccagcggtgagatggacggcatacgcatcttctccatccacaagtccaaaggactggaattccataccgtactgattcccttctgcgactggaagctggagaacgaaaccaacaaccagctggtgtggtgcgtcccaccggaagagccttataatgccatcagcttagtgccggtgaactattccaccaccatggcggaatccatataccggcaggactatctgcacgaacgtcttcagctgtgggtggacaatctgaatctgctgtacgtggcctttacccgtgccggcaagaacctcatcctctggagccggaaggaacagaagggaaccatgtccgaactccttgccaacaccctgccccgcatagccaaagacggagcaggcagttgggacgaagaggctgccatatacgagaacggcaggatttgtccctcctccgtccccgtctcacagcatgacgcagacaaccctgctgatgacgaagccaaacctctatgctgcgaacgtaaacctctatactgcgaacgtaaacctgaggtttatgaacagcaaccggtcaacagactttcgcaaaagccggtcaaactgcccgtccacatggagagtatgctccacgacatcgagttccggcaatccaaccgttcggcagacttcatagcaggagtagacgaagcagagtccagctggcgtttcatcaaccggggacgtttgctgcataccctattctccgctatcgaaaccgaagaagacattgacaatgccatcagccagctcgtctttgaaggtgtgattggacggagtgagacggaagaagaaatacgcaatctcacccaacgcgctttctccctgcctcaagtcaaggactggtattcaggaacgtggcagctattcaatgaatgcgacatcatctggcaggaaaacggtgaactgcggacacgccgcccggaccgcgtgatgatgcgtggcgaagaaatcgtagtggtggacttcaagttcggaaagccaaacaagaagtacaacaagcaggtgcagggatacatgcaactgctggtccgcatggggtatgtcgcagaaaatatacggggttacttgtggtatgtagaggagaacaacatagaaccggtataactcactccccatccactattaattatcaattatcaactaaatcatggaaacattcctccaactggtcgcccgcgacctttacgccaaaataggaaacgacctctcgcgcaccgccatcgttttccccaacaaacgtgccagtctgttcttcaacgaatatctggcagctgaaacggaccgccctttgtggtcgcctgcctacgtcagcatcagcgaactgttccggcaactctctccattgaagtccggtgaccctatccgcctggtatgcgaactgtataaggtgttccgcgaagagacccgcagcgaagaaactctggatgacttctacttctggggagaactgctcatcagcgatttcgatgacgtagacaaaaaccttgtagatgccgacaaactcttcagcaacctgcaagaactgaagaacattatggacaattacgacttcctcgaccaagaacaagaagaagccatccgccagttcttccagaacttttccatagaaaagcgcacggagctgaaagccaaattcatctccctctgggataaactgggcgacatctaccgccactaccgccgcaatcttacagaactgggcatcgcctacgaaggcatgatgtaccgcaatgtcatggagcaactcgacaccgaccgactgcgctacgaccgctatgtatttgtcggcttcaacgtgctgaatagagtagaaacccgtttcttccagctcttgcaggatgccgggaaagcaatgttctattgggattacgacgtgttctacacccgtcttccccttgagcaaaagccgccctatacccacgaagcaggcgaattcatcctccgcaacctaaagctgtttcccaaccaactgcccgaaacttcttttgatgtactgcggaaacccaagaacgtacgctttatctccgcttctaccgaaaatgcacaagcccgctacttgccgcaatggattagggggaatgaagaattaagaaccccttcttcattcaaagacactgccgttgtcctttgcaacgaatccctactgcttcccgtcctccactccattccggcagaggtaaagaacgtcaacatcacaatgggatttccccttgcccaaactccggtgtacagttttatcaacgcccttgtagagctacagactaccggctaccatgcaggtaccggacgatacatctacgaaaccgtaatcacgctgctgaaacacccttacacccggcaactttcccccaatgccgaaacactggaaaaacagcttacccgggacaaccgcttctatccccttccctcggagctgaagcaggacgcattccttgaacaagtctttacaccacagaacggcatcgccgccctatgcagctacctcaccgaactgcttcgcgaagtggccgtcctctaccgccaggaaaaagacgtggaagacatcttcaaccagctgtaccgcgagtctctgttcaaaagctacaccctcgtcaaccgcctgctcagcctgatagagaccggcgaattgagtggtgtgcgcacagacacgctgaagcgactgctgaaccgcttgcttacctctgccaacattcccttccacggagaacccgccatcggcatgcaagtaatgggggtgctggaaacgcgtaacctcgatttccgtaacctcatcatgctctccctcaacgaagggcaattgcccaaagccggaggcgactcctccttcattccctacaacctgaggaaggccttcggcatgaccaccatagaacacaagaatgccgtctatgcctactacttctaccgcctcatccaacgggcagaaaacgtcaccttattatataacatctcttcggacggactgaaccgcggggagatgtcccgcttcgtgctgcaattcctggtagagtcgccgcacaacatctcccttgagtaccttgaagccggacaatctccacaacaagccctggaaattgagattcacaagacaccggagatgttgcaacagatgttcgacgcctacgacatccaccgacgtcccaaagcgttcttctccccctctgccctcaatgcctatctggactgccggctgaaattctactaccgatacgtagccggcctgaaggctctcgatgaagtaagcgccgaaatagactccaccctcttcggcaccatcttccaccgttctgccgaactggtgtacaacgaactgacaaccaacggacgggaaatacgtaaagaagacctggaacagttactgaaagacgatgtccgcctgcaagcctatgtggacaatgcttttaaagaaaagttcttccatgtgccccttacggagcaaccggaatataacggtacgcagcttatccattccaaagtcattgcctcttacctgcgccagcttctgcgcaatgacctgcaatatgccccgttccgtatggagggtatggaacaggacgtcagagaaatgatggaaatagatactccgcaaggaaagcttgccttacagataggcggtaccatcgaccgcctggacagcaaaggagacacgctacgtatcgtggactacaagacaggcggtactcccaagactcctgaaaatatagaacaactgtttactcccgccgacaaccgtcccaactatattttccagacgtttctgtacgccgccatcctctgccgcaagcaatcgctgaaggtagccccttccctgctctacatccaccgggcagcttccgaaagctactccccggtcatcgaaatgggagcgccgcgacaacccaaggtaccggtcaacaacttcgctttcttcgaagacgagtttcgcgaacggctgcacggactcctgcaggagatattcagccaagaagaaacattcagccaaacagaggatacccggaaatgtgaatattgcgatttccgcagtctgtgtaagagataaaaaaacagaccatccgttcataagaaacagatggtctgcacgaccgtaacagacggtctatttgagtctgacggatggtctgttttacttcaacggaccatccgttctattttcttcgttatcacttcttcaccggaatagagaagctgaatatggagccttcgccttccttggaagtaaaccacagtttaccgccattcttcacgacaaaatccttgcatagcaacaagcccagtcccgagccttcttcgttgttcgtgccgaacgtgctgaaatgcgtatcagtatgcaacaacttcttctgcccctcctcgctgatgccacagccataatcctggacgctgacaactgccataccatctacttcctccatcttcaccagtacctctgagttctccttactgaacttaatggcattactcaacaagttacggaccactgtcttcagcatgtcaatatcagcgttgaccatcattttttccggtttcatctcgcggattcttatcttcttcaggcttgccaccatactgaaaatctcaatgacaccgtctgtcacttcgacgaggtccacatcctgataaaccacgttcaacttaccgatttgactctttgtccatttcagcaggttatccagcaatgaaaacacatcctccgtagtctgattagccatcgtcagaagctcgtacatttcggcgccaattttctcagatggcaagttcaatatcagcatattcagcaccattttgatggatcccatcggagaacgtaagtcatgggcaatcaccgaataaagcttgtcacgcccggcaatagtacgttgcagttcttccgtcttactcaaaatcaaccgtttggcagctaccaaagatatttggtgggtaacacggataatcaattcctccttattgaaaggcttagagatgaagtcattcgcgccaacctgaaaccccttcacaatatctgccgtactattcagtgcggtcagaaagatgattggaatatcagctgtattcggatttgactttaaatgttgagctacttcaaaaccactcatgtccggcatcattacgtcaagcaaaaccaaatcaggattttccttttccacctgttccaacgcttgccgcccgttacttgcagtagcaatcgcgaatttctcatttgtcaaaagcactttcaacaataaaacgtttgacatcacatcgtcaacgatgagaatcttgtattcggaaggatttatttccatgttcatctttctatattgtttttcccgttatcaaaattactatttagttaggaacgatattccttaaaatactctattatatactgtaaaccctcttccagctctatagtcggttcccagcccaacttttcctttgccagagtgatgtccggctgacgctgtttgggatcatcatgaggcagtggcttgaaaatcagtttcgacttggaattcgtcagcctaatgaccttttccgccagttccaatatggagaattcattcggatttcccaagtttaccggaccgataaaatcgtcctccgtgttcatcatccgcaccataccttctatacagtcatctacatattggaaacttcgcgtctgattacccgaaccgtatattgtaatatcctggttctgcaatgcttgaaccacgaaattggaaaccacccgtccgtcattcggcaacatccgaggaccgtacgtattgaatatacggataatcttgatccgcactccattctggcggtgatagtccataaacaatgtctcggcacaacgcttcccttcatcataacaagaacggaggccaattggatttacatttccccaataactttccacttggggatgaataacggggtcaccgtacacttcgctggtagaagcctgcaatatcttggcattcgtctttttggccagtcccagcatattgatggcgcccaatacagaagtcttgatggttttaatggcatcatattggtagtggatgggagaagcaggacaagccagattatagatttcgtccacatctgcctcataaggggtttccacatcatgcagtacaaattcaaagcggggattgctcttcagatgagtgatatttccttccgaaccggtgaaaagattatccagacaaatcacctgatgcccgtcgtttatcaatcgggtacaaagatgagaacctataaaaccagcaccgccactaaccaaaattttcttcatgtaatgttttttatagtgccttaaagcacataggacctattctgtttgttttgatgctgacaaatgtaggcgatttgactaaattatgcaagtttgcaacgaaatatttcacttgttaatgaatataaagaggcagattaaaaaatccacccctgaaatattcatttatttatccgccacatactcttctttcttatccggaatgctgaagttcttgttcgcaaacaagtctgccagacccgaaatttgctttaaacgcaacacttcgtcgcgatccattccgatattcttcattatccattcatcagacataccggctctgtccaattccgcaacaatatggcacatcaactcgatattatgcgtaccacgggcacgattatgacggatagtggacgccatacggttggaaagttccttgtcaatcacgaccacgggaagcaacccgttttcgcgctgataaattcttttggatgtcttcaacacctgataacggtggtaaccgtccaccaggatgtagttatcctcttcctcatcatagtaacagacacaaggcatggtgaaaccatcttcccagatggaaagctccagaagcttcatttcgggcggtgccactacattcggattgtaatcgtttgcttgtattttctctattggaattgcccttacgttatataccggacttttatctacgctcataacatcatatttttgaattgttccattatcttgtctcttttgtatgcctcttccttgttcaaggcaaaacccatgtacttgcaggcatggtcattcttcaggatgcatatgcacatccgcttataagtgggaatttcccggaattccgcgatgtcaatatcatccagataatccatgcgcaccggcttcttgtttgtcttgtaattcgtgatatttatcacttcaatggacactcctgcatccctcagcttctggatggtctcgtcagccagacagcccccttttgtacgccagaattcaatgctgacggtaagctttttcaagtagttcctccgggtctcttccggcaaggtggaaagcaggaactgcataaagcctttccacgtatacccttcgggcagtcggaccgtctgccaccccatagcacgcgtccctccgtaaataccggtaaagttcaccccgttgacccgccctatcattcttccccaagtattcgggtcgatgacacgatacagcttcaggctctcttgtgcctcacaaagaaaagggcttgccacacgctggcgttcgatattgactccggctttataatataggtcatacaaatggttatagtcaaagccgaatttgccattggccgtccagatatccgtcgtcttccaatcataaatgggataagcattgaaaatgtcattgcctatcttcgaggtccagcggtaattgtggtacatctgatacttccggttcagatggatgctgcgccagcggttaaaactctcttgcgtacggatgcctatgagaaagcaggcacgcactccatccttcttctcatgcagccatttggcaaagtgcatctggaactcataatcccacatttcgggagtgtagaaaggaaacgtctctttagtgaggcagcctttcggcatcttccttacccaaatgtcctccaaatcctcctgccacggacgccagtaactctggtacatcgacgtacaagtcgttacacggaaaggcacacaaacacgatacacctccaatatatccttattcgcctccaatacccggtccacataatcaatggtcatgctgtactgtatctcatagtccatatggaatacacacagtttacggttcagccggttccggcggatatagtctatgcacaaattcagcaacactccactatcttttcctcccgaaaaagagacgcatatcgtgtcaaattccctaaaaatcacatcaagacgttcttgcgccagttcatacacatttttgggtgtagccataattatctgtttttcttcattttcacataacgggtccataccttgtcttccaaaaagcccagctcgctgaagacatccctatcttcaacaaagctaacagccgtcagactactctcctcgccctgcttctcaagtaccttttccagaagcaattttagcgtgtcaacattcctttccttaatataatagttgttgatgacacattcatacttcttgtgctccaccggcacaaaacctacaacatgtttattatccagagcaacaaaccactcgtactcttccgatgtccggaaagggtaattgtagttctgtttcagcacttccgggctcataaccaaaggggctacaagctcgtacagctttttatccgtaccatgtaattgcactatctgtatcatatctacatttatattatttgtaattacgtgttaaagataaagcttatttacgacggaatattctccttttaaatagatttaagaatatagccctgtaatataaaatattaataaataaatattatccccctaatttgtatatgttgattaatttgggtttctttgcaaaagaaagtcacccgaagagaaataatgaaatatttactgctttttatgacctttgccaagataggaatgttcactatcggtggcggatacgctatgatacctctcattgaacgggaaatcgtaaaaaagagatggatgagtaaagaagatttcatggaaatgtttgcgttgacccagtcacttcccggtgtttttgctgtcaatatatccatattcgtcggctacaagctgcataaagtaaaaggtagcctggtgtgtgcacttgccacaatcctcccctcttttgtcatcatgatgctgatagccatgttcttcgctcattttcaggacaaccaggtgatgatacgcatctttaacggtatccgtccggcagtagtcgcactgattgtgataccctgcatttcggctgcacgggcactgaagctgaagtattggcaactggtgcttccagccatcgccaccatactcatctggcaattcgggctatcccccgtatacattgtccttgcaggaattgcaggaggaatgctctatacattatggttaaaagataaactgagaaaattacagatatgatttattggcagctgatattggtatatctaaaaatcggaatgttcggtttcggaggcggttacgccatgttgtccctcatccaatatgaggtggtggaccaccatcactggctcaccctgcaacaattcacggacgtagtggccatctcgcagatgacgcctggtccgataggcatcaacagtgccacctatgtgggctatgcagttactcaaagcgtgtggggagctgtcgtgaccaccattgcagtatgtcttccctcgttcatcctggtattgctcatctcttacttcttcgtgaaatgcaaggacaacaaatacatcaaggcggcaatgtcgggactgctgcccatgtccgtatcattgatagctgctgctgccctattgctgatgaacaaggaaaatttcatagattacaaaagcatacttatctttgcagccgctttcggcgtgacgtggaagtggaacctccaccctatcttactgataatccttgccggagtcgcaggcttccttctatattgaagaagcggtagagacggacaccatcttgcgagcatatgcccacaccacgcaataggcaaccagcggtacgatgaacgcccacaccatcgtcgtatggtctgccaccagtcccatcaacagcggacctaccacgcctcccacgggagacatcatcaggaaagaggaagccctcttggtatggttgcccagcccgcgcaaggaaagtgcaaaaatcgtgggaaacataatagcctcaaatgcatatccgcacaacagagctgcaagcgacaccattcctacatccagcaacaccaacaaggtagtcatcacagtgcccgtagcacaaaccagcaacatcttctcggcacgcacacgtcccataatccagctaccggcaaaacgtcctaacataaataatcccagtccaccgaaagaaagcactacggaagcttcgcgggcattcatccaattctgctccaccacgtagttgatgaagaagctgttgatggaaatctcgccgacctcataggcaaacaaggctatcagcccgaaaatgaaaagccggtgtgaccacaatccgaccttattaccagcttcgtccacctccacactatgttcaatctcgggcaacttgattcttgaaaagaccaacgctaccagcaacacaattacccccatgcagatatagggcaatgcgacattacccgagcccgtctgcccatccttcgagaagagcagcagtccagccagtaccggtgcacagatacatcccagaccgttgaaggattgcgcgaaattcagccggctggcagcagtttcctttgcgcccaattctgtggcataaggattggcggcagtttcaagaaacgtcagtccacagcctatcacgaacaatgcaaacaagaaaagattaaaagacagataatgctgcccggggataaagagcagcgaaccgacgccgtaaagcaacagaccgaataccacaccccggcggtatccgaagcgactgatgaaaaatcctgcaggaatggccataatgaagtatcccatatacatcgtcatctgtataaaggccgaatgtgtcttcgtgatatccagtatctcttgaaagtgcttgttcagtacattcagaatggcatgggcaaatccccacaaaaagaaaagagaggtaatcaaaatgaagggcacaaggtattgtctgcccaccaatggtattcgtttctgtttcataatatgataattccagacaatcgttgcaaggcgattgataattgcgggtgcaaagataaacaaaactcccggtctttacccaacattttcctattcgctattgtacggagcagctttttctctaactttactgccatcatacaatgttaagccatgaaaaatgccatcccacgatacaatttctacaaaactaagtacggaagcgaacttctgatagatgtcgttgatttgcagtatacccggaaattcttgacccagggaaaagtacatattctgacctactatgacatcaccttcatcacagaaggagaaggagaattcactatcggtaaccggacacacttggcagctcccggtgatgtattcttctccaaaccaggtgaggtgcgcagttgggacacagaccgtatcggcaacggtcatgctctaatttttgaggatacctttttgacctctttcttcaaagacccactattcgtgcagcacctcccgttcttccgaatgggaaaaatggtagacaaactccaactgccgaacgggctctatgcacgaatactccaacttctgcacgacataaaggtcgaaatcgactctttccacccacacgatacgggcatattacgcgccttactttacgaagtcctcatgctactcaaccgtgcctaccgcacctctatccctccggagacgggtaaggagccacataaagatatcagcagtttccacctcagccgattcttcgaattggttggggagcacttccgggagcagcattctgtacaattctatgccgataaactatgcatcactcccaactatctgaacgaaatcctctcttcggccataaacatcaacgccaagcagtacatactcaacaaggttacagacgaagcccagcgtctgctcacctacaccgacctccccatttcagaaatagcctccgaactccatttctcaaccgtctcctactttgtacgtagtttccgacaatgtatagggtatactcccctcgcctaccggaaaatggagaaaccgtgaaaagtgacatatcctccttcttttttattgtacaaaagttccacttaccggctatctttgcccttgaaacaataacccataaaaaaaacaaacaatgagagatgcagaaaaaacagtaggaaacatgattgacaaggaaaaaaccatctttgtcggttcggtggatgccgaaggctttcccaacatcaaggccatgttgcaaacccgcaaaagggaagggatcaaacacatttacctatcaacgaacacctcgtcgatgcgcgtttcgcaatttctcaaaaataaccgggcatgcctttacgtctgcaacacacgcttcttcaagggcgtaatgctgcgcggcacgatggagatactgacggacagcaccagtaagaaaatgatatggcaggaaggcgacactatgtactaccccgaaggagtgactgatcccgattattgtgtcctgaagttcaccgccttcgccggtaggtattacagcggatttaaatcagaagacttcacgatagaataaacgggccatccgttccagtccatcagcaagcagagcccggggacaagcgatattcagccggataaagccctctccaccgggaccgtacatcgtaccggaattgaccatcagatgctgttgttcttgcaaacgcaaggcgacagcatctgagctgataccggaggcacggcagtctatccaaaccaaataagttccttcgagtggcagcacaggatattgtggtaaccgttctccgaaaaagcagcggaggtattcgtaattcccccgcagatatttccgcaaggcatcgagccattccccaccttcgttataagctgccattgtggcgattacgccgaacggattgacgtcgcatacctcgttgatattgatggctctgtcaatacggcggcgcacctcttcatcggctgcgatgatattggcgatttgcaacccggcaaggttgaacgccttgctcggcgaaacgcaagtgacggaattttgcaaaaagcgttcggacaaggaggcaaagggtgtgtagtcatatccttcgtaagtcagttcacaatgaatctcatccgccacgacaaacacctcattccgtaaacaaatatcacctatatgctgcagttcttccggagtccagacccggccgaccggattgtgaggattgcacagcagcaggatttttgctttcggatcggaagctttcctttcaagatcggcaaagtcgattacgtagcggccatcttgataaatgagattattggcaaacaactcgcatccgtcattacggatagatgagtagaaacaattataggcaggagcctgaacgatgactttatcacccggcatggccaaggctttgataatggctgacagagccggcacgacaccattcgtatagataatccaccgggaatcaacctgccagcgatgccggtcatcgaaccaccggacaaccgcatcataataggcttcgggtacttttgtataaccgaaaataccgtgcgccacccgcttttgtaaggcatcgataatagcgggtgctgtacgaaaatccatatccgccacccacatgggcagtacattctcctcttcgggaatatcccatttataagaattcgtcccgcgacgcgaaatgattgtatcgaaatcgtatttcataatttataaatccagttaccatcccaaagcctcaactcacaatcggcaggcgcctttatattttcgtcgagaatgatttccccatagctttcggcagtgatacagcctgtccgtggattcttcaccccgcctattgttcctttgatggttgcctgcaccgaactatattcaaaagcccggtcgcagtcgggaccaaaggtgcaattctccagtacgaggtcgtgggcatagcagagcggttgctcaccggttatatggcaattcaccaaccggagattgtgcgaatgccagccgagatattcgccgttgagttcagaatcgtagattgtcacattctccacctcccagaaggcatccttcgtagtgattttggcattgcgcaactccacattcttcacatactggaaaacgtacttgctgtcgctttccaatccgtctatgcggatgtcgctgctgaacatgaacggataagttcctccatgcagtttcagatttttgatattcagatttttacaacgccagaacacctcattggcatcgtttatctctacattctctatttcgatgtcgtgcatctcgcgaaacattttgggtgcatcgatacgcgtatcagtcattttcagatggtcggaataccacagtgccgaacgcccgccgacatcgaaaaaacaacggtcgataacaaatccgtgaacatgccagaagggataatttccttcgaaccgacaatcaacagcttcgatgttgctgcattccttgatggctgattctccagcacggataactacattctccatacgtaagtcatgcgattcgaacaaaggtctttctccgccaaatgctgtatttgatattattttcatcttgttttcaattttattattctattctctttatcaattttgcggggacaccacctactattgtatttgcttccacatctttcgtcacgaccgctccagctcccaccacagcattgtcaccaattgtcactccttgaagaatcgttgaattagaacctacccagacattcttgcctagtacaattggtgccggataggtagtttggcgttcagccggaggcaaaccatgattgagcgttgcaaagactacattatgcccaatttggcatccgtcgccgattatcacaccaccatggtcttgaaaatgacagcaggcattaataaatacgccttcgcccactgttatattcttcccgaaatcggcataaaacggcggaaatacccggaacgatgacggaacttgataaccgaacaattcggatagcaactcacgtacttcgtccggcgtatagtatgcggtgttcagccgtaaagtgatacgcctggcttcactgctcatttcgtccataaaacggtgtatctcctccgtattaagcgcttgacgcgtctttacatattctttaaattcgttcgtagtcataatttctcctatttaatttttattaccaaattaatgataatgcaaaaataggcggtatccgtcatatgccgtgtagataaatccccggtatctatacccaaattacggattatgctgtcccctccagctactaaatcatagctccataaaacaaaaactcccgtaatcgcttgaattacgggagtgtgggtggtgttatttaagtttatcgtattcttcatccgtcaccggctctagccattcattagaagtatcctcaccgggaacttcgaaagcaagatgggcaaaccaaccatcagaagcagcaccgtgccaatgcttcacatttgcagggatatggataaccgtaccgggtagaatctctactgccggcttgccttcttcttgataccacccacgaccggcaacaccgataagcatctgtccaccgcctttagtagcacggtgtatgtgccagttattgcggcaacgaggctcgaaagtgacgttagagacggaaacctgctcacgtgaaacgggagcaagatagctgttacctatgaagtactgtgcgtatgctgtgttcggttctccaatggggaaaatcatttcacgctggaacgcggctttggtatcttcaccggcggtgtcctctgcccatacgcctttggccagattaaacgctgcccacgctttgggccaaccggcatagaatccgatatgggtgatgatttcagcaatctccgtacgggtgatgccgttcttttttgccgactgaaggtggaacacgagcgaattatccgtgattccttgactgataagagaagttatagttaccaaactacggtcacgcagaccgagtttgtcggtgcggctccagacctcgccaaagaggacattgtcgtttagttccgcaaatttaggagcaaactcacccaactgggtgcgtcctgctgtctgtactatcttttcttgtgccataacattgagtgttaaaatgctgaatactgaaattaaaaaaatcttgttcatagtcgttctatttattgcatgaagttattgagcttgttagccggattaagtggcgtctggtcagacaagaccaatgatttgaccatgtgcaacgttccttgcttgtatttctgaaagtgttctgatgcaatatgtttttcataagccgcatggctcgcataggtttcgagaatagtcaccttacagggattctccttctcgccgaccgcatacatagtcagcacgcccgattcggtacgcagagagatttcgcctacttcggttgcgtatttcatatactcgtcgagatactgcggataaacctcgattttcgacaaccgcacgataccgtcagcactcatcggctctttggcacacatacccggccgcttatccagattcaggcatttgccgataatctctcccgtggcaaggtaggaataggtcggaaattcaaacaatacgggtttcagcttcgtatagtcaagtttcccgttattatcaagcacttcaggagcagcgtatgtattgactatcgcacaaatgaaattgtcgaaaccttcagtttcatagatgtctaccacctcacactccatggtgaggggtgatgcgtctataacgggggtaccgttttcgccaatatggtaggcaaacacctccgacttatcgaccgtcgcaccgcttacacttcccacatagtcagctttcggcaatatttcacgactcactagattgacggaaagtcgttttgagtcctttatcccttgattagtgtaatggcttttactcatgctgatgagtatccggtcatgtccaataacacccgtatgccctaccactagccagtttactttcccttcaacctctgccccgacaaccgtcatcggcttgggatagagcgccaacagatttccgagatttttcttgttcgtttccattatattgggttgaacggtgttctcctttacgggaatactgcacgacattatgacaagcagtgacagaactcctaaaattgtttttgtcatacgttatattactctatttttcttgctaaacttctgatgacaaaggtaccgcgatagcacaagcgaaggtgtatatgatttacggatatttgtacccgaattcccgattataccgcaagaaagttcaagttcatcagatgagtatagtaagactggcagaaatcccacgaataatcccacgcatgatttgtttttaatcgttattcttgccgatacagaaaacaaaaaaagctctgaaatccttgaatttcagagctttgctttaattttctatttgctttcgcggtgcggacggaactaacacattttactatcatattgataatcaataaaatacttgttaaaaatatattaatggtatcatatttatatcatctccgcttattttcttctataattttatgcaaagcttctatttgcatcattgcaccctcataagccgctttataattgacattcgcatcaatatccgtctcaatcatattccctttgccagtacaaagccacttcacattcaattccgggaacttatccacaatacgagctattatatcagttccaatagaccccttcccgttccttatggaattataaatgtatctatttgataattcacaataagcctcaaacgagttctcacctttgacaactcccttatcacgtgcataccttgcaaattttcgtaatctgtcaatagccctttcttccatatcaaataatcttttgacttattatgcgtaatgcttgccacatcccccttatttctcttctctcgacatctaactggccatgcttggggttatcagcctttaaagtcagcacattatccaagaaaagactgttttttaatatccgtttgactgaaagtgttttcccatatacaatactcacaactcctgacgcgctttcccacaaaccttcttctattttgcgagcaagaattttagctccatccggtatagttggctccatgctgtcgccacgtacttgaaagaccatataagaatcatcaagcacttcaccttcttccggcatgacaccataagaatcaatttcataagctgtattatataagctttcgacaaatgaagccgcggcatccatcggaacatattttacttttacaagaatatcttgaagataaggagctactttactaatcgtagagtctgattgcattctcgcatttttcagagcatccctaatatccttctccgaaggttctatttgtcctgatggagtctttgcaaacaaaccttctccagtatataaccatgctctgctcacatcgtatttctcacaaaaagcatcaattgtttttttacttggcagctgaatccctttttttatactggtaagggttgattcactggatataatattgtctttcttcaatttatacccactcaaaccacaatatgaaattgcttgcaaaaacctttttgagaggtcactcaattttttatcgtcactttcttgcatacttcataaattaagtagtatatttgcattcgtaatagtagcagtattaccacataaattgattaaacatcctatttggagtttatatatagaaatccgtaaatagctgctacctatttgcggattttctttttctccacattgtgtaattggcggtaggccgcatagcggagagacagagggttacactcttacaactcaatactgcgaaaggcgtgcgatattgagaggcaaacgaaaccgggatgcctgcacagctacaagtaagcgaaaaatccgggaagtcgggtaacttgttaatgcccggccagctaagaacggcgtacttatacgaacgagacatttcttatgctgcatatagcaaaaacgggaaaccgtctaagggctaactatgcagcaatccagcaccttaccgaatgagatcgtcttttacttcttcaattattacaataataatagaacgacattactttttttcagaaagctttctttttacgcaagccctacctgcataacatcttataaaccagcaatttatattaaaatatgttttataacatatagaatactacaaattttataaagtattttattgtacttctgaaaatatgaagtatatttgcaacgtcaaacaaacaaagagtgtaagtttgaacaataagaaagctggcgacttcaaaagccacttactacatatctcattggcaaatgtagttgttagctttcttttatgcaaattttttgtggaaaatttaagtataaaatagaaaataatatgaaagtaacaaagaaagatattctaagcattaaagctggttcttccaaagtaatgcagctggattcttacaaggattgcgtcaatgcaagaagctacgcctatcaattagcttttactgatccccgtgaagacgttgaaagatattcaatatccatcgacaaagataaaaatcagataaccatcgaagcaataaagaaatgaaccgttcagaggccaaaatgattgcagaagaactgcacaagtttattcgcaatgatgtgagaaaggctgtaactgaaatggcgactgctgaaaccgaagagtatttgaatgccaaacaagctgctgtatttctcggatggaagttgcaaaccttatacaatcgaatacatgatattcctcacaccaaaaatggcaagagtctcatttttaccaaatcagctttgagaaaattcatggaaagaaaataatcccggacggatttgatcgtctttccgggaactaacaaaacgttctttgacatattgtatagtctgaacaaataaagactttaaacaaggtttactgcttatctaaagggcgaaatagaccgacaaagtagccaaagcggattagtgaaaagagtgtgaatacggactgccaataagaggatgcagcacatgaatcactaagttatcaaaaacaacttatattatgacaaagtaaacgtagggcgtttataaatacattcttaactgaatagatactttaaatgatatatatacccgtgcttcgcaagaagcggtcaccgctaaaaagctacggccaacaatccatcggaacgcggacgggaacacattttaaatgctaaaagtatgaaaggaattacagaaatgaccgagcaagagattcttgcgttaacggaggaagatgtacagaaattgattaaactccgcatgatggaggaaggtatcaaaattatggataagccggaggttcccgaattgtttgagattgaaccagccgatttgaaaatgttcacgatcccattttttgaaggctacgcttttacagatatggaagaagcgaatgcggtagcagaagcattacgtaatgcgaaaacccttcgcaaagttgaatacgattggaacaaactcggaagcgactacaaatacctcgtcaagaaagataaatacaattactctatcaagccagactttgaggttaactgtagctttgtgtattcaagtgaactatacgaaaagatttccaactttgccgtacagaacaaggttatgaaagaacaagcggcgaaagaccaaaaggaatatgacgagaagatacaagaagcgtccggcattatctcggagataagcggacgggttaaggaggtcaaagttaagtatgagcgattgaataggcttacttacaaattcgccacagactattatcccctttccgatcataacgaggatatggcaatgaaatttatggctaaagcctattcttttacagatgaagaaaaagaatacatattacagaattacaaagaatgactatccacaagtgatgaataagttttttagttagttattggctccttgcttgcgaaagtagggagttttttgtaaaactctaaatccattatatgagtaatatagaagatacaatttacaatctgccaaatgacgaatatcacaagggagaaagatttaaagacttcctaagtagtacgcagattaaagattatatggtgtccccaaagtttgcccgatacaaggcattacaccctgaaatgttcgagatcagtattgaagcttctgaaaaaggctcgctgtatcatgatgcaatggaaagccttgttaatactggaacacttgacaaatggagaaataatcttcttgtatttgagccacctataaatcctaaaactggctgtccgtatggacgagacactcaaaaatatcagattgcactaatagaggccaaagagtcaaatccgggtaaaacattgacaagcacaaccgatatgcaattggttgaaacaatggtttatgagcttcttaacaattgtcgggacacttccaagcagatcaggcagatattaaaatgggggaaagccgaagtcagccatttcgttgaatacgaaggatgtaagttcaaatatcgccctgatgtggaaacggccaaaaagattattgactggaaaacattggcggttgatgatcttcatgaggaaacagttaaccggactattgccaaatttcattacggtatttcggcagccttctaccagttttttgaacatgaacgtactggagtatggaaagagttctattgggttatgcaacaaaagacagctccctatgacgcagtatttgtcagtgcagcaaactgggctttccatttggaagacggaattgtgaaaatgggtgcaagtgcattggcattcaagaaattgttagaccagcatgtttactgtacacaaaataatgattttgacggtgcacagatatttattcagccgggattcaaaggacgaagaataatggtgcctgacacacctgcatttgaaaagaacaagatgtttaacttttataataatcaagaacaatgagcaaaacagagaatcaatccccccaacaagggaacttgggaatggaacaacacaatgttccttcaccaacaaaaacagaaccggcctccccaacaccttccacaccacaaccgcccgttccttctgccccaccagcctttccggtacaactgaaaggattggaaagctgttttatctcccctaaaaaggcatttatagcagctggcggcactgaacagcaatttgcccgtgaagtcaatttcgctatgcaggcaatgttaaataatccttatctgattgactgtgcccggcaatatcccgatcatcttgtcgaagcaatcaaaaacgtttctctcaccggtctgacactcaatcctgaattaagattggggtatcttgtaccgtacaaaggcaaagtgaagttccaagcttcatatatggggaaagttgatattttgatccgcaccggcgttgtaaaagatatttattctgatttggtttatgctaatgacgagttcagcatgacaaaaggtaccggtggcactatcatccacaaacccaatgtattcggagaacgtggtgatcttcttggaggctactattttgcagtcttgacttccggtgttgtaaaattcgatgcaatgcccaaagcacgtattgaagaaataaaaagccgtagtgaggctgtcaagaaaggcaagcaatctccgtgggacacagactttgaagaaatggctcgaaaaacaatcgtgaactgggctttcaaattcctgcccaaaaccggcatttcagattccatgattaaagttcttgaaacagagagccagttggatgatgaaatgtttgaagactggaaaaaggcacaaggtcagaaaccggacgattttgaggaagacgatactccatacgcagaagaagtcaagtaatggattcatgtgagaaaattagtaacagtatcacagcggctaaagagctaattgaaaatgaagcacgttctttggccgctttacacaaggcaaaacagcttgaaaaaaagcttcgtaaatccggtaaattatttcgtattcctacaataaatggaattatagaaacaacctgcccggaaaaatatatcgaatacaataaccaatttaaaatcaagttaaaatgaaaacagtaacagttgaagtgcccgaaggacacatggtaaaaatcgtgaaagaagaaagtatgcaatctacccaaaaagttatgggggggggtaaatttgagtttgagggtgagacattcatccccggtgacgtaattatcaatccaaatcgcggaggaggcagcatgatgattctctctgaaattagagaagaaagactacttccttttttaccagcaataaaagtgcctttcggccttgtcgcctatgttccttccaatgatgaaggtgacagagtttttgtaaaacccacacccgaagcaggtatcggaggcatgaagggattccgtaaagctacggaagaggaaaaggccaaaatgctcgctgccatgaaggaagaaaaacattactccttcaattttgagaagttacagcttgaatacattccgactatcggcgatgttgttattgtatggagtgataacaaaaaagatgcggtagtcggtgttatgaatgaaatggataaaacagtcaggccatacaagataaatgatggtacttggtatgggaactgcgacaagttcgtttcagaagaacaatataaaaatttgattgatgggaaagagtaaatctaaatcggggggggcgagaaattacactccccttctcacagctcgcccaaagggaatgagctaccaagaatatcgtgaacgcagagcctatcagaacgcatggttgaaagagcgactgaaaggctttatttgttatgtatcgtctgaactggttgtatatgacaaaataacgggattaccccgattattcaatcatcgtacagatgatatacacaaagcaaacataaggactaacccacagccatttgtcggttctgcccgatatggcttaaaacctttatgatatggataaagaactatttaaagataagaatccattgcttcgcaggcaaatgttggaagacaattgcgcagcagttgaaagaattacctatacttctcctttcagcgaggaagaaatgggtgaacggaaaacggagttggcaaatattgaccttgacatggccgcactggaagaagaaaagaaagctttcatgcaagcatacaaggacaaactgaaacctaaaaaggaacgtaaaaaaacgttgcttaccgatataaaacgtggttatgaggaaattacagatgaatgctttaagtttatggatcgtaacacccgtaccaccggatattacaatggtaatggcgatttggttaaagaacgtccgatggaggcacaagagatgcaaaaaacagtcttcgaggacatggaatctactggtacggagggataagctatgaggaaagaagaacttatcaagcaagtagccgaatcaaccggtatcgctatttgtgaagtccgaactgtcatagaggcagcactgaaagagaccgtggatgcagtggctaatggaaagactctttatatcagaggttttggtacactgtcacccaagcactataaacgaaaagttgctcgtaacatacacaaaaacgagactattgtcatagcggagcattatactccacacttcaaaccagccaaatcgtttaaaaacaaaactaaaaaattgtagaacagcatggaaaacgagaagatgcaagtgaactttgctccgggtattaccgaagcaacccttagagttattgaacttcacgaagaaaatgagttaccggtactggagcctgataaggtagagttagccggaacaattggaagtgtttatgaatttctcttgaaaagaatctctgaaaaagagcagatcaatcagaaacgttgctatattcttgttgatcgagagaaaatgacacttaaacttgtcactaatgaaactgacagtaggaataaagctactgtaagaggtgagttgaaatactatcccaagtttcttgaatttggtatcaacacaagcaagacatgggagccggtgcagctttcaaaattcttcaaaatgaatcgtgccttcttcaaggatgcacaatacaacatggaactggttacagtcctgaagaacttcaaagccagcatcgactcaaaagtggaaaactcccgacaagacaacggtagtcgcaccgacaattacagccaagttgtcaactctaatcttcctgcttcattcaatcttattgttccgattttcaaaggtcgcccggcagaagaaattgaagtggaaatcattgcagatgtggacgggcgtaatattcgattgtctctttgctctcccggtgcagaagtaatagtggaagaagagcgtaataaggccattgacgagcaattgttgttaattcgtaaattggcaccggatattgccattattgaacaataacaatgaagtctgtaaagaaatactggaagccggtacttgttgtatcggctttcttcattggcaaccgcgtattcaatcacataaatgcgtggctgggaatttcaataatcatgctgacagtagcatttatagtttataatatcattaaaaaagtagaaaatgaaaagaaagattgattttttgattgtggcattatttgccgttgttttgttcatttcatgcgaaagagttgctcccaattatgccggtgtccttatggaaaactacggcaaacaagggaaagaggattttaaaattgtttccggtaaggtatctacatgggaattaggcacagaactttttcaagttccgctattcgatcagcgtggagaatttgccgaagctgtcacactgaaagcagctgataatacggagttcaaggcacgtcccacatatagctacaaagttatcaagaaccgtgccattgatgttgtctttgacaacaagcatattggccgtggaagtgatttcatgtcttcgttagaagataacattttggagcctcgtatatatgatctgataaaagaggaaagccggaaacataagactgacagtttaatggctgatggaggctcattagtgtttgagaaacgattagagcagatagttgataaagagtttaaaaaaagaggtctgcaactactcacattttctgcacagttggagttttccgataaggttcgcgaaaaaattgacagtagaaatgaagtaaacaccaatatttccgtattggatcagcaaattgaggaacagaaaaaacggaatgaactggaacagttaaaaaccgagcaggctctaattcagtcaagaggtctgacaaaagaaatattatataaacagttcattgacaaatgggatggaacaagccctttgtatggtattgctcctgaatttctaaaaataacaaaataataattattaacccgattaataatcagcttctcccggtgtggcttgaccgcctatccgggaactatcatgcctcaccttttttcttctctttgcaagtcgagccgagtacgctgcatacgctccacggcggtagatactacaaagagtctttttgttcatataagaatgcctctattgtggaggcaaacgaataagtggcggaattggaagacgcttagtttctgtggtaaaaatgcacgaatagcatcacgagtcaggtaatcatgctattaacacttgacatacgtacaaacggaagcagaaacgaaaatcctgattgcaacagttcccggttcgagtccgggcttattctcataaatcaatcattatgaaagttgaaattcccgactatttcttaaaatcctttatccgacattttgaaaggataaccgagaattgtaaagcatcaccttctgacatcaagaccagtgaagcactaaggcttggaaagaaagatatagttaagctcaaaagatttgtaaacaaaaagtataatttatgaaacgaaggatcataggtatagatgttggcaaaaacggtggaattgtagtgtacgacaccgagaataacagattattggagtgtatcaaaatgccaccaactcccaaagacttattagattttctctctatatacaaagaaaatagcgtttgttatttggaacgagtgaatggcatgaccggacaaagtgcttctgcctcttttgtttttggagaaggttacggacagctgactatgggattgatagcttgtgggattccgacagtaacagtatctccacaaatttggcaaaaagctttcggattacggaatacagacaaattgagtaagacagaatggaaaaacaccttaaagaagaaagctcaacagctgttcccgtatgcaaaagttacattggcaacttcggatgccttactaatatgtgaatatggtagaattaaagaaaaggaataatggaaaattttaaaaaatgcagtaaatgtggccgggaacttccggccagcgagttttggaaaaatgcttcaaccgaagatggattgcagacatattgcaaagagtgcggtaatgtttatgccaaaaaccgtaagaaaactccgggggggggattgaagaaaatatattccaatcctgaattggcaagattttctccacgggaacttatcgcagaattgaaagcgcgtggatataccggagaattaaaatttacccaaacaatatcattataatggaaaagttacgtctattggttacaaccaaatgtccgaacaaatgtcctatgtgttgcaacaactcatgggatttttcaaaattaccagttgttgagcattttaattacaaagagatcatgataactggtggagagccacttttgtttcctgaaaaactgtcaaatttggccgaaagtgtcagaaccgttcagaaattggcctatggcaataaaggaaaattatttctatatacggcactggctgatatgcttcccaattatatcagatatttcgatggagttgtttacactccacattctgctaatgatgttcatagtttattgaagaccaataattttttgttggactacaaagatgaacttatggaaagtaaatctcttcgactcaatctttttcctgatattaaaaagcatattcctgataacacaaacctttcgttatggaaagtaaaagatatgcaatggatcaaagattgcccggttccggctgatgaagagttcaaaagagtagctgaattatgggaggtggaatgatgaaagatgtaattaccccccccaacatctctatccgtatcgctggtttttagaagatactgtttttactaaagataaaggaaaggtcttttcttgctttgcgtgtggtggtggctctacaatggggtacaagttagccggatttgatgtaattggctgcaatgaaatagatcccaaaatgatgaaatgctacattgaaaaccataatcctcaatatactttcttagaagatattcgtgatttagtgagaaggaataatcttcccgaagaattgtacaatttagatatattggacggatcaccaccttgcagtacatttagcatgtcgggattacgtgaagatgcgtggggtaaagaaaagaaattcaaggaaggtcaaaagacacaagttttagatacgctcttttttgattttattgcacttgccaaacgcttaaaacctaaagttgttattgctgaaaatgtgaaaggacttcttttagggaatgcgattgattatgtcagacgtatatacaaaggctttgaggaagctggttattattgtcagcattttcttcttgatgcttctaaaatgggagtacctcaaaaaagagaacgtgtattctttatatgtatcaggcatgatttgggagtccattttctaaaagtttcagacctcttcaatgttgagccacatatttgtatgaagtttaatgaaatacccattttgatgaaagaaataacagactttaaggggaaagaaattaaaaatggtacaaaaattcgatatgtttgggaacatagagaaattgctgataaagacatgtctgatacatgtatgcgactatacggtaaagagttattcttctcaaagaaatatatacttgaagatcgcatctgcaatacgataacttccaagcatgatgatttggtacactttacacaacctttatatctaagtacatctgaaatctgtaaagtatctactttccccatcgactataacttttacaaccaatccccacattatatctgtggaatgagtgtaccacccgttatgatggcacaagtagcctcacgagtatggaaatattggttatctaaattataaatcaaatgaaatcagaagaattagcagcccaatggtgtcgggatcatcctgatgcaacattggaacaagcattcatggccggattaggccataagatgaatatgaataaggattctctttctgaaaggaaagacaaattcagaagtgaagttctcatgtatagagggaaatatcctgatgatatgttgaaggactttttcgagtattggactgaatgcggaggacggaaaatgcgctttgagaaggaacgtacatttgaagtttccaaacgtttagtcagatggtctaataatgattttaacaagtatgggaaacaacttaattcaagtcaacagcaatctcccggcaaccgaaaagaaagcgttgaaagacttgctgaccttgcaagcggagtattacaagggattgcacgtaagttcgattaaagaagctgttctcaatactcctaatctaccactctccgttataaaaagagaaatcacattggctggtgcaagagctatactggtaattgcgattaacgagcttgtgtcttttttcaatgttggaaaaacgatgaatgatgttcaagtggcacttaccgctgatctaataatagacagattctattatctcaaattggaggaaatcaaattgtgtttccgtaatgctatggcttccggtaagatttacgatagactggacggtaatatcattctcggctggttaaatgaatacgatgcacagcgtgatgaaattgtttcttctctttcaattaatgaagcccatgaacaaaataatgacaacactggaatgttctatggagaatatatcaaacatctaactgaaagatcggaaaatggagatgaagaggccaaagaactactggaatcccatcaatcattcatgcaaagaatgaaatcaaatgataaagaagccgctttcaaaaaatggaaagaagaatattatggaagaactaagaaacaaactacttgactgggcaaaacaatttgaaacacctgattttataaaagatgatcctatatttttcccacataagtacagtgataaaaaggacatagaaatcagtgcctttcttacttcatggatagctttcgggaatcgcaaactgataatgcagcaagcggaaattttggataatctaatgggtaattctccttacgccttcattatgaacaaagtatgggaacaatacaaagaaaatacaaataccttctaccgtatgttcacctaccatgactttttctgcatttgccagcggttgtacaacatatatcaggaatgggatgatttggaagtcttttatgagggttacaataatgttatccgtgaaatacagacagattttggtggcgtaaaaggtattccaaaattggagcgtgattctccatgcaagcgtatttgtctgtttctacggtgggtagtacgaaaatcgccggtggatttaggtatttggactattattcatccaacagaattatacataccattggatgcgcatgttgcaaagatggcacaccggcttgggataacaacacgcaaaacagaagactggaaaatggttcaacaagtaaccaattacatgaaaacaattttcccggatgatccgtgccggggagattttgcattattcggatatagtattaacaataaataatttacattatgtcagaacttaaaatcacacaagaaaaggttacagccgcttttagtgaagcaaacgactgtcctaaagcaattagtattctaacagctttattcggaaagcaaaagccggattatacagattatcacaatatcaaaacctacgaagatgcttgtgaagcaataggtgtaaaacctattgttcgcctacttgttgaagatgaagacggacacaaagaagaagtggctgatattgcacacctcgcctacatcaaactatgcacaattgcccgtgcattgaacaacgatcctgattttccacgatttactaaagatgaataccgttatacgccgtggttttatctttataatcagaaagaaattgatgaaatggacgaagaggatcgtaatcggctggttctgtggggcggtggtgcggattgcggtgcgtgttgcggcctcgcttgtgcgggctcgaatggcggttggtcgggctcggctgcgactttcggctctcgccttgctgtaaaatcaagtgaaatcgcaatttactttggagaacaattcaaagaattgtggaaagactttctgattggaaaaaagtaatcacactggggaggccgcattaaagcggccttttccataccttttaaatctatgactccaaaagaatttttcgacaaagtggtagaaatgcgccgttgccaaaaagaatattttaaaaataagagacagatagatttacgaataagtaaacaaattgagcgtgaagtagatgaagaaattgaacgtgttcaaaaaatccttcatgacaaacagaatccgcaactcttttagactatggttaatatgaaaatccttgacctgccattaaaagcaaaatggtatgaaatgatcgaatccggaaataagaaagaagaatacagagagatcaagaaatactggatcggaagattagcaaaatgtggaggtcacaattcctatgaaaagactggtttctactgtaagaaagctatttgtttttcttgtattacacgtggaaacggctttcatcccaaagaatacactcatgttcgcttccgttttggctacacccaacggacaatgctttttgaacttgaatctataaccatcggagttggtaacaccaattggggagcaccggacaacgaatgtgtatttatacttaaactgggaaaatgtattaaaaaaaatgaaagtaaggactcaacagaatttcaaccgaaaaactaatgaaacagtattcggtatcagcatcatgcctgacggtggcaaaagatattgcaaatatccaatagggcaccaagaatacaaaggctatacccaagcacaccaagctatgaaagatgtacaaaagatattggataatggaggccgattagtgtattctcccaaaggtagtgccgggattaataaaaatgaatatgtaaaaattgaaatgacataaaaatgaaaatattagtaagtttttcaggtggtaaggattcacaagcatgtttgatccaagccttcaaacaatatgggggggggggaatttaaccgctgtgttttgtgacaccggttgggaacaccctgacacatataaacatgtgaatgatgtttgtctgcaaatgggagtaaaacttataactctcaaatcaaaatacgattttgtgtctttagcagctcataagaaaagatttccttccacgaatgcacggttttgtaccagtgaactaaaaatgaagccaatgattgattatgtactttctttgaaagaaagctgcattatcatacaaggtatcagagccggagaaagtacagcacgtgcggcaatggaagaggaatgtatgtactttaaatcgtattttcaacctaataaaaaaggaagaactgaaaattaccgaagtaaagatgtcaaagaatggtgttcccaatatgacgcctctgttctaaggccaatctttaaatggagtgcgcagcaagttatagattgcatactggatgcagggcaggaaccgaatccattgtattatcgcggattctcacgtgttggatgtttcccatgtattatgtgtcggcacaaagaaattgaacttatagccaaaaatgatcctgaaatgtgtcaacgtctgattcaagcagagaaaagcgtaggacattccttcttccctccatcatacatacctcaaagattttgtaagaacaaacaatatccttatgtagaggaagttttggaatatgttaaagaacatacccctgatatgttcgagccagaaggtggatatgcctgcatgagtctgttccatgggttatgcgaataaataaaaatattatgaagaaaatactgcttatctgtacactccttgctttgctaactggatgtactgcaccgaaagtttataaaaagaatcgctttacaaaacagtttcaagaagcagattcaatgtttaatgaaaaatatggattaaatgagtaaagataatatagctcaacaatacaataatatggttgcaagtattgaagatgctaaaatttatgatggccggggagaatataacctatatgaatgtaataaatgcaataattataaggtaactctatacaaagacaaaggtgtaactcccttcatcatgagatgtaaatgcggaggggatatgatgcacacgaaatcttcaaaacaagctccaccgtcatacgtgaaagttcataattgggtacgccccagtttgaagcaaacaatgtcattgagtaaaggtatgcgtaatcatattctaaatggaggattaatattagaggatgaattaaagtgatctgataaaatgaaagaaataactattggcgacaaatctttaatgcaaatatcaaaagaggatattttacaattagccgtgatgcaaggttgttgtgctcatttagatttttggaattatcccactttactggaatatgacaataccatgtcttctgatacagtcgttatatcgtataaatctacaagaaaagaggatggaattgaaagtattccgttggttttcttcttttgtgttagcgacttatcttatcattatcatagagaaaacgtaacagaaaaatggtatggagaacgtttaaaaataaaagctataaagttcctcatagaaaaaggatatgatgtgccaatttattaatagtacagaaaggagccaatatgccaataagtgaagtttataatatggattgcatggaatatatgaaaaatattcctgataagttctttgatttagcgatagtcgatccccagtatggcatagacataatgcataaaggtgggatgccgaagcatttaggctttaaacaatataaaagaaaagattgggataagtccccccccccggaaagaaatattttgaggaactattcagggtatcgaagaatcaaataatttttggtggtaactactttactacctatcttcctcccaaaatggggtggattgtttgggataaaggacaacatggattaactatgtctgatggtgaattggcatggagtagttttgacaaggctcttcggatcataactctaaaccggtgtacaattggagaacgaggtggaaatatccatcgttgtcagaagccagtgaaattatatgctgaaatattaagaaaaaacgccaaagagggagacaaaatttttgatagtcatttaggttcaggaagcagcagaatagctgcttatggacttggattcgatttctatgcaaccgaaatagatgaagaatactttgaagcacaagaagaacgttttcaccgggaatgttttggggagataaaaacagagagaggaacgttggttcaaactaatttatttgataaatagatatgaagcagacattagaagaagccgtaaatgaaattggaggcgtacatcctgactgggataaaataacttgttttagaataggatttaaagaaggagccagatggcaaacaaaacaacctccgtgggtatcagtgaaagaacggttgccgaatgaaaatgaagacattatcattctatgtaaacatggtgcgatttttaacggtacatatagcaacaatgtatggttctgcatggatggttatatccatgatatgtacaaaggtaatccgatttactcttcaatgagcagcataccttcatcatgggaaccgatagcatggatgccaagacctaaatttgaagaataatgaatatcggaattttagccgttgacagcaatttccccaatttagcacttatgaaaatcagtgcttaccataaagcaagaggcgatcaagtggaatggtataatcccctatgtgaatacgacaaagtatatatagctaaagtattcactttcacacctgactataactattatatcaatgccaaccaaatagaaaaaggtggtaccggatatgatattgaaaaagttcttccagttgaggttgatcgtcttcaacctgattattctatctacaatattgactccaatttgtcctatgggtttctgacacgtggttgtcccaatcggtgtaagtggtgtgttgttcctaaaaaagaagggaaaatctcaccttatatggatattgaggaaataacagctggacggaagaaagctatccttatggataataatatactggcctcaaactatggcttgcagcaaatagaaaaaatcatcaaactgggtgtcaaagtggattttaatcaaggactggatgcccgcttaatcacggatgaaattgcccgactacttgcaaaagtaaaatggattaaacgtattcgctttggatgcgatacgccgggacaaattgcagaagttgaacgtgcttccgctttgatagacaagtatggatataaaggggaatatttcttgtattgcatccttatggactttaaagagtcgtttgcgcgtgtcaactactggaaatctaaaagccgccgttttctcccacactgtcaaccctttcgtgatctgaacaatccacaccaaattattccacagtggcagaaagacatggcacattgggctgataggaaggaaatatacatgagttgcgacttcaaagacttttcaccaagaaaaggatttttatgcaaggaatactttaaaatattgtgagatgaaattaaacaaaaagacagagcgacttattaaacgtaaagccgctgaacttaaaaaattatacgaaactcctaatcccgaagtagataaaattatttctgaattgagagcagaagcaacgaaacttccacagaacatgagtaaggaagaagagattgcttatattctgaaaaaggctgatgaaaattgcgatcatatagaaattcgtaaaatcctaaatgaaagtaatacatgaatacatcttttgaacgatctgcaaacgcttccgatgaatggtacacaccacgagaaatcattgaagcattaggcgaatttgaccttgatccatgtgctcccatgcaccctctttggcctactgcaaaaatcatgtacaacaagcaggacaatggtcttatacaaaattgggggggggcgaatttggcttaaccctccgtactccaaaccgcttatatggcagtttgtagagaaattggcagaacacggcaacggtatagcactactttttaaccggtgtgacagcaataagtttcaagacatcatcttcacgaaagcaaccggtatgatgtttttgaggaatcgaataaaattcttccgtcccgatggaacacgtggggacagccccggttgtggaagtgttcttattgcatttggccgggaaaatgccgaaattttaaggaattgctctttacaaggcaaatatgttgaacttaacaatgataaatgatgaaaatcttatatttactcatgctcattgccggtcttttatggatcggtgatttctccatcaccttaaagcccttttctgtatctttaccatgctggtataaaaccgttggcatacttctattttggctgtcaatgactatatatgttttaggcgagcatactaaaggctataaggaaggatttgatactggagttaaaaagtgcattgagatacttgatagaaattgccactctaaagaaataaataatgatgaaacggtacagaatcaataaaactactacattcgtagaagataatcacagcggaaataaagagaaatacctcattcctgattacaaagtgcaagtcaaatttgcgtggatttggataacagttaagtccttccatgatgaagatgaagaatacgcaaaaaattgtgcgaatgaacttcttgaaaaacttaacgaaaagatttgattatgattgaattacaagggaaattcggcaaagattgtaaaatatttgccaatacaatagaaaatgaagctatcggaacgatacaaaacattttgaataatccggttacgactggtgttccagttcgtgttatgcctgatacccatcaaggagtagatatagtgattggattcactatgccggttacagatcgtgtcaatcccaatcatatcggagtggatattggttgtggaatgttatgtgtagaaattgaaaacgcaataacaaaagattcttttccggacattaatcatgcaatccgttccaccatacctatgggatttgagattaaccaacaatccttatcccaacaagaaagggagaatttgtttaccttcttatctatcagaatggaacagttctgctctaaattccaactggcaaaaccggttattagtgaggaatatgtatcacaactttgtaagaaggtgggaataaatgaaactacattctacaactctttaggtacattgggaggtgggaaccactttatagaactggggcgtgctgagtcaaccaataatatatttcttacaatacataccggatcgcggaactttggtgtgaaggtttgcaaataccatgccgaaatagccaaatttgacaaaaaagctttttctaatgaaattcaacgcttgaaatccactgttgaaccacaatccatgcaagctgaaatacaacgtttgaaggaaaaatttgccgggtattccgggtatctcacaaatgaagcaatgtttcactatttatgtgacatggtgattgcacaaggatatgccgctttcaaccgcaagttgattatacaacgtataatcaaagctttgggctggaacactgcaatatctgttgagacagtccataactatatcagctttgatgatatgataatccgtaaaggggctattgctgcatacgccaatgattatgttgtgattcctatgaatatggcagacggtattcttctttgtcgtggtaagggaaacaaagattggaattattctgcaccccacggtgccggacgcttatactcccgttctgaagctaaagaaagattatcaatggatgtattcaaagcccaaatgagcaatgtgtattctacttccgtatgtgaagggacattggatgaaagtcctatggcatacaaaaatgttcaggagataaaagagcttatagaacctacggtagaaattgttgatacaattgtgcccctaatcaatatcaaagctgtatgatagaaaagacagacttcccttatactcttggcggctatgtcgaacagcaaaattataaaggtttcgacatagccgtttccattcgcagatacaaaggaatatcagcttatgtcatttcctcggagaaaaggctgatccgtgaagaatctgccacctttgccgacaaagaagacatgttccgttggggacgagaagcggttgaccggtatttggaacagcaagaacgtagaaaagaagagaatgcagtcaaacgggcagactattataagaagaaagctcgtgtggcagcattgaaagcctttaatgccgctatgtatttctctgatataaaggatggactttatgataaggcaaaaggattttttgaatatgaactggataaggaacatgcaaagatcagatgaaaacacttgatattatacaaggcttttgcgatcatgtttttcgtgataaaaaaggaaaccgcatctttcccaatatttttgtcgggaaatgggaagctgacttattggaagttacccggtcacgcctgacttatgaatatgaagtaaaagtaagcagatgtgatttccataaagacaaaaagaaaagtgataaatatggcaagaacaagtttgatgttgtcacttccggccaacgtaccaattatttttattatatagtaccgaaaggtttgataaagcccgatgaagtccctgatttctccgggcttatttatgcttatgaaggatcagtgcaatgttattctcttgaaaagggaagatatgcagtaaagagaattttctttgaagtagccaaacctgcccaaaaagtttctgacatgaaagcggatgataacttcattcgtaaactcgacttatccatgtactatcgctatcaccaaatgagaagagacaattacaaaaacaaggaataatatggaattaagattagaccctgaaataccggtcacacgggttgtcaacgggcataatgttttcaataaaggctatcaccacggattacgaggaaaaacctatgaagaatactatggcaaagagagagctgttgaaataagaaaaagacacagcgaggctttgaaaggacatagatattggtctaatggaaacgcccatgcctttgcgtgtatcgcaatcactcccgaaggcaaatggtatagattcgagtcaataacccaagctgcccaaaagttaaatctgaattatgccacagttcgccggtatataaaacgaaaaatcaaaccccaaaatggctggcaatggttcttggagaaagataataactggataaaacatattgatgatggaaaagctgaatgaaatcgcacaaaaagcttatgaatgtgctgtaagacgtggaaagattgatcccgacaatgatagtaacaacaatctccaccgcgatctgcttgaagaagttgccgaagtctttgaatgtacaggtgagaaatctccacatattaaagagtatttagatgtagaagaagagctggcagatgtaatcattgttgccctaagcacactacaccatttcaaatgtgacattgattcactcattgaagccaaaatgaattataataaaaatagaatggattgatatgggaaccggacaattaataaaattgattgttgaggcgtttgtgcttatctttgcactaccatgtgtctataaagatttcatgaacttatggaaagaaaaataagtgatataaaagacaaaaagttgaaagctgaaaatatcacattggcagcaatatataacatattgttcaccaatgatatagtttgctccttaattgtagaaatgttaagtgcattacgcaaatcagggctttgtcgtttccgtgtaaagcagcaaggaaataaactggaacagttgatgcttcaatatgaaaagaaaatcaataaaatagccggaaaccgagcttttttcatggctgatgccaaccaatatgttgcagatgaagtacaacctgatttgcttaaaatggaatactccattaaaatggagtttgacaaatgccggattgagaatagtgccttacttgccaaagtagaacttgcaagatgtatggcagagcttgcttgcctatcccttgacaaacggatagaagaagtccgtccatataataaagaagtaaccggaataacatatctccggctcactgacacatttaaagtattggatgaactttctgatattttatataggggagggtattgtaacctcaatcaaagcgataattgcaaaaggggtatggctatcatacaacgaaaacttactgattgtgatattatcagccgcgcaatcaatgagtcagacaagttaaatcctgctgataaagacggataaaaatggcaaaatatcgtataggaatatccgaaagtttattgggagattcttgctattaatgtcagatcaaaaggtttggcatttggtgaaatgatgaaagtttcggtaccaaagaacgaattttagatccttaattccgcaacactattacaaatataactttttaagtacctgagcaacaaaaagttgctcaggaatttgccatgtcagatttttcacctatcttagtgttgcaaatcaaaatatgtatcaaacccgacagacatggcaaaggtagcaattaaatccgagaaactcactccttttggaggaatattttcaataatggagcaatttgactccagactctcatctgtaatcgactcaaccctcggtatgagatgcaggctgtatggttatcaatacagcgaaatcatccgttcgcttatgagcgtttatttttgtggcggctcatgcatcgaggatgtcaccactcatctgatgtaccacctttcgcttcatccgacacttcgcacatgcagtgccgacacgattcttagagccataaaggaactgacccaggataacatttcctacacatccgacactggcaagacctacgacttcaacacggcagacaagctgaatacactgctcctcaattgcctattgtccacagggcagctgaaagagggcgaggggtatgacgttgacttcgaccaccagttcatagaggctgagaagtttgatgcgaagcctacatacaagaagttccttggttatcgccctggcgtggcggttattggcaacttgattgtcggcattgagaacagcgacggcaacacaaatgtccgtttccaccagaaggacacgctgaagaggttctttgaaaggtttgaacaaaacaagcttattatcaaccgtttcagagctgattgcggctcgtgttctgaagagatagtggaagagattgctaaacactgcaagaccttctatatccgtgctaaccgatgcagttcgctctacaatgacatctttgccctcagaggttggaagaaagtggaattgggcggcattgagtttgagctggcctccattctcatcgagaaatggaaagggaaggcataccgtcttgtgattcaaagacagaagcggatagacggcgaactcgacctgtgggaaggagaatacacctaccgctgcatccttacaaatgactacgagtcttccgagaaagagattgtcgaattctataacctccgtggagggaaggaacgcatcttcgatgatatgaataacggattcggctggaacaggcttccaaaatcctttatgggagaaaacacggtgtttcttctgcttatggcactcatacgcaacttctataaattcatcatggcgaggcttgacgtgaagaggttcggactcaaagcaacaagccgcatcaagacgtttgtctttaagttcatctctgtgccagccaaatgggtcaggacatcaaggaagtatgtgctgaatatctattcatgcaacaatgcttatgccaatgtgttccagaatgactttggataacaccgacaacttatagtcgtgattttgcgtattgcctcaagtcgcatggtggggtaaggggcatttatatgtctttatggtgacattcgatgcactgtgccccctttttactaacgatgcagattcttttcgcttctgtatcatattaggcgcgtagttgcggatttgaggtagattatgcttgtaaacttaaaaaaacggacatatagtgtttaactatttataaactgattatgaaattagaaggaagaatcatcgtggcacaaccgatacaatcgggtgtatcaaagaatggcaataactggcagagacaagactttgttttggaaattcccggccaataccctaagaaagttgccttttcagtaatgaatagtaatattcagaattttggattggccgttgggcaagatgttgatattgaaatagatattaatgcgaatgaatggcagggaagatggtttaactccattacttgctggaaagcaacactccgtaatccgggacagtctgccgcgccacaacagccccaaacttattatcagggagcatcatccaccacggcaccctcacaaaacatgcctcaaccaccagtggatttcggggaacaaaaagacgatttgcctttctaaaaaaggagaagggagccgaaatgcccccttctttttattaatgttccacttttacgatttcattataaactattctgcttcgtgggttataattgactattgtttgtttatatccctttgtaccccatctccaccataggaacttgtgtttatatatccggcttatcgcgcttgaaagactgtctctcacttcataggtaaatgtgctatcaggaatatttgcataaaaatccacccatttatctgaataattgaaactgctgtctttcagaacaaatacaatactgtctttagtgacaacttttgtggttgtgatatattcgacttctttaggacgcagattcaaatcttttatcagttttgcatccgcactccgcagctctttcaattcttcaatgttaagccgcaaaacatggttttcaaccacatttagactatccctaatcttatattcttcaagtccagtacagagacttttcatattatctgaaagtcgggcactttccattttctcttcctgccacaaccggtacatcgaaaaggttgccgcaaggagtaacacccaaattactcctatacctatcttccacctcataatcaatctgtatatacatttttaccaacttctgcaataaccacccatgcaccattacagaacccatatatcttaccgtcattcgccggcatttcaggtattgtgttaagctttgtctcattggcagtggctttgctaagagcactttgagctgtactttttgctgcatcagccgttgtttgtgcggtcacagcctttccatccgtaacagccaacattccggtcagagttttttcattggttactcctgcaaggaaggtttcaatttcattgaaggtatcaatggccgtagtcgcatcaacagtgccaaccagttcatccaatgctgttttcactgcatttatggactgttccagttgggattctgccaattgagcacgtccgctttctgccaaaatatccgatttattcgcatagctgccactatcagaactctccaaaaatgaagatgaaataggaagttcattacatcctaccataacatactgtccggctatcaacccgtcaacatttatatcacagaactctccgacactaagtgctgttttgtaaggtacataatcctttccattagaacttttatacacaacaactctattgtttgctgcatctccaaaattgatgctgattgcaaatttcccagtagataactgtaccggttggctttcgtaccaaccctcttctttaagagtaaaattcaattttgccatatcttctatatgtcgtttatatgtttgtttcctatatcaactcccagcctttccttacctcatccatatttgcaggaacgccattctcaacataactcattgcagctaccaccgcaataagttgttcccggttgtttctgttcagaactgtatgacgagatatgcccgaacgtttttcgactgtggcaatatacacgtcagtattgttttcacatggcggtgcccatcgcataataacatcttcaagttcattggccgtaccatctttgtcagtatcatacttattaagaatataagtttgaagggttttaaaagcagcacgataaccgtatgccatagttttaaactgaaagaagcttttatctgtctgtgttacagacaatccctgccatttcgtattatttcttcgtatatttaatggattattattccgtagtccccgtgtcatttttatcctccttttctttttgtgtttcaaacaatatttgtgcggccagtcgtgctatatcatccttattttcaatgattatactcatagtcttttccgctttccgaagctcggccttttcccatgatttctcacgtactgatttaaactcgcagaagacacaataagcagcccataacatagcaaataccggaaatggaatgacaatacaacaaataagatcaatcataaccagtgtaagaaacggattaaaatacttctttgcttttgtcgctgtcattttatactttttcgaggtacgaagttctccgcgctgctttgccttctgaatccccgaaataaaatctatccccattgcgattatgatagctgtcatacttaccgctatcaaaaccaaatgtaaaaacaaatggtcgtgaatgaatgtttcaataatgtcgttcatatccttttgtgtttgcgtttattattttattccaatagtaatttgttgatagcatcaataaaggctggggaacataaacttgcgtattccttaatcatattacactcttcatcgttatactcaatttctccattggagttgaatattttaaatgcgagtgcatgagcctctattcctctaccaagttgataaatgatatttgcaaaatcctttttgtagttctcaacggagcatcttgtcttatcaatatcaacaaaaacctcaattctttcaaaatttatccttttcataatcacttccaatcattgtcgtttgaagcaccaaacatcagacctcttcccaaccagtcagagttcggtgacggatacataaaatctgccaattgcatacaatggtgcatagaaccgccattcaacgtttgctttgttccattcgcatatacctgaacattattataattgtcatttgcattaaccaagaatatcctttgggtaacggcgagactcaaaagataacggtaggtcgcgcttgacgttattctgaatatgaccgtatcgactggaaagcccgatgtctcgccgttataatcgtatcttggcgaatagcaaggaactatataataagtttcattatttgaagaagtcccggaagtcaaaggaatataagtaccggctttatcagccccttttgtgtacacataggcataggagccataaactaccataatgcttctttctcttgcgccaaacacacctctacaccataagtcagaagtgtagaagcgtaatgatcggctgtctttagttccttgatgatacatatcaccatcaaaccacatccttccatcacttccaaaactgattcccccaaccgcattaccagcatcatttacgcaattcagtcttgtaaaagagcctgacacacctttcaatgtaccttcaaaagtgctgtcacctgaaatgaccgcaccagtagcataaagtttccctgctatacttactttatatggtgcatcagtcggtgttgtagctccaatccatagcggatagtcgccaccaacaagccctgccgcaaccgttgtgttgtcagatttcataatcaaaagctgattaccctgcataaatcgaagaatagcgttttgagccatgataagcggagtgtacaccggtaccaaagaattaaacttctgccaataagttgtatttgttactggaatggaatcactggacgtatgagttttcagacatttatacgcgttaaacgtattggcaccggtagtcacaatagcaatatccaagtaccgggtaccggaagtcaaagcctcgtcattgcgatactctatgcctttagcccattcggattgccggagaatacagccctgaagcccgtttttccccggttccccattagtaccgtcaattccatttttggcctttcttcgtattaatatatgcccttgtgcctccataccggattacttcaattttgccaatacttcttttgcgatctctttagccttgatacgatagttctgataatcagtatattctttcagatactcggcacgcttatcttcgtcaagttccgaagttgtatcacgtgccatttccaaattggcaaaaatggcatcacgtttgtttgcatcataacgttccatgataatggcgcttacaatgctgtcataatcatgttccccttcaacatccacattttcacagacatactggtcttcaaccaccacatcttccgaaccggccttttgaacagcttctcttctctcaaagtcaaagtaaatgcgtagcaacgcaccttcaagtacaaattcaataccagtcggcagttctcctacaagagttccataacttttcataaattacctccatttttataattattcttcaaaataataagcactcttcccgtcacctaacgaacgccgcttgacaatcacattttccactggaaaaatcttttgaccgttattctccgcttcgcgagcctgatccaacacatctttcaggttgtaacagttcgttatgaatttgctacgttgtccgttctgttcaaaaagaacacaatatcttccttcaccttgctttgtcttcacattcgtttcaaagtccactactgttatagggacattgagaatatccatcaatcttgtttcttttacatcgaagaacttctttccatccttcgttctaccactctgtttgatacctttatctgcaaaactcatatcattatttgttattgttctccataaattcttacaatctccccacttgcaccagccccagtatgaagctcgtatctcgcggttacgtttccggctttttatccgtttcacctttcgggcaaaattctttttcatacttttgcgcatccgaacattatctttcgtgaagcaatagcccaaaaagttaatccttcttcctcttactacgttttcgctttctacgctttttgttcccattctttgtttctgttcctatcggagcgatacagctgttagctttgactaccaacccgacttttgcactttcccgttcatacgcacgaatgagaaataatgcttctgccttagaacgagccagcataacattatcatcacaatatctatgcaggcatttgacatgatatttctccttcattgtatgatctatccgacttgccgcaaaattgccgataggttgacttgtaaatgctccaattggaacacctctttttccgttcaacttcattctccaatacgtcaattaactccgttccgctgtcatacgataaaacagctatctcaatcagtttaataaatcgttcatctttaaatttccttctcaatgcagcaacaataagctcatgaagaatactttgataaaactttttaaaatcagtttttacgaaccatttgtattccgggtaccggcgaaggaaacttttcattctccttactccaaaatgaagtccttttcccttaatacatgcactcgtatcataaatcagacttttataaatatcttctccaatcaccctcataatcgcatgatgcaatatacgccacgggaaatatttctgtttgacaatatctcggacttttccagcatcacttcttaccttcatcacgctataatccggtgccggaaaatccaatgtcagaatcatcaactgcaaagctcggaggtcttcttctgggtgaagattatgccgcctgataaaacgatttttcttaaccttcccatcttgtgcctctctgtccgcttcacgcaaattgtttatttctgcaatgcgttcaagaatatatccgactcttttaggtttctttccaccgcttgcttctatccgtctatcgtcagcctctatcctttccgctataattctatcaatttcatcatgcgacagatttctccaatcaatatcatttcttccaatattcactgttgctttgttttaaaatttacaccatacttccaattttgtcttgttcagactattttaattattccgataactgcaagctgtttctacttgcttgaataattcgcccggagctttcgagaaccaacctactaacaccgcttgttgccttccgcaaattgggcaacctttccgcattcttgattttctgacatcgtaaccaattgattactacgttgcaacgatataattcctgcaaggtcatggctcggagaactcgcagatcactctacgataaataagtatggcgagagccgatattcgcattcgagttcgaccaatcgttattcgagttcgcataagcgaggccgcaattcgcaccgttattcgcattaccgccccacagaaccagctcttgttcccctctaccaaccgtccacgcctttcggctttcgtcccgttatccgtagccgtaaaacgagaaggtggacgggttttaattaattgaaattcaaagaactaatatttcaaaatctatcatgcagccatcaaagatgcaccgctaacaaatgttaaatctccaaaatacgcaaggcgagagccgacagccgcatccgagagcgaccaagcgttagacgagtacgcagaagcgaggccgcaactcgcaccgtgacccgcaggaccgccccacagaaccagctgcccagtagtgtttgcccatgaataatcagcccaataagaagtgctatttccaccaatctttttcgggaaaatatcaaaatgttccccaagaattatttcctgcacttggccggaagttgtctgccgagtagcttgtctgtattcaccattgggatgtgccgctaattcagcggtagttggtaaacggttccctttgtaaatgaaaatttccgttccactttgagcactgttattggaactaccacaaaatactccctgcaaaaattcccactgccagccataagggtcttctatacccatcatattcacccgtgagcaatccactccggtattacttccattcaccacagaaatagctattttaccccaattgtcaccgaggctttttgttgcaccggttttcaaagcagctgccgcagcccacaaatctttactggagctaccacctacaccataaccaagcttcgcttgaatattggtatctccatattgggataatcccaacatcataatgagttttcgctgatcgtaatcagtcaatccccattccttaccgttcacttgtgcagcagtccaaaatgcgttgatcgttttactacctgccggtgcaactcctgaacgtgaaacaagtgcgctacctgacatggagcctttgtatgcaccgatacagttatacattccaccatttgccccaccaataaactcaccgccaataggtagcatggagagccataagatcggtacaccacttacactgtcagtctgtacacgataatacaaacgcggccctatccacatcacatgccctttggtttcatctaccgtagtaccatcagcaaacaccgcactattggtaggagacattttagcagcccttccatcattcgttacgagataacggccacaatacaacttgtattccgtccatgcagctgtattacctatcacaccatagtttgtgctactttgggttgattgtttgattggaatcccccaagccacctgcctcaacatttgttcatcgccgttattgatagcgttcatgaagttttctacggtaatgcgtctaacactaccaccaacttctaccagcactgtattggagcgcagaatggaagtcaccaatgtttcatttcctaatcctttagttgccataatattatcttgtttttattaattaaatttacactccaccaaaacatcaacatcatattgagtcccgttcctatcagtttccgttgttgttacagatatggaatttgttgtagaatgcttcaaacttttccagttttccttatccatcacatccatagtccacgatgcggaagtaggagtataagttgatcccgtagtcatatttacaatcttggcacttactgtaacgggttgtccggtatcaacctctttgttggaagaagttatataacatacaatttgaaattcatctgccgtatcaatgatacgtaccccggcacgtgctatcggttgtgaagcacttgaagactgataaacctccgctatgaacaattgagtaccgtccacatcaccacgggtaacagttacacttttctgtccgttcttatcagtccaagccaccgtgtccttataccattttatatagtaatcggtaatggcattggcaccggcatacagcttggtagtcagagtacaacttgttactttgcttgttaactgttcggtacttgcaagaatagcaagatagtaagaactggctcccatattctgaatggcaataggcagttccccggtcaaattatactcaacacctgccgtagaagccacacatgaataagtcaatgtatctcctgcaatattcgttttactcgccaagtttccgataattttaatggcaccggtactggtattcaaagagaatttgcccgtactgtcttttttccaacctccactttccgtgccgttaaaatttaaagccactccattgtaagcccaactatggcctgacaaactgaccgccaacccacgcgccgaagttactttgggtgtccgtatcggctgatttgcggccacactccaatcaggagagacagccccactttcttcatctacggcctgaaacaatggaatgccattgttttcaaaagtcagcataaggctgtcattggagcgaaggcgtttgatcgtaatgctattttgggcactataattttctgccatattcccaacctccttccgatataatttgatttatgcttgtattagtgtaaacaataccgtccaacaacagtattctatcttccaaccctccatcaagagaggataaacacattacttccttctcattcaagattatggactcttcttttaccaagtgccccaataacagcaccccggcatccaaagccttttccttatttgctacaacatacctcatatcaattatttatatatatgttcccgttactgtccgtatattcatttgtcccatcagtcaatacagagaaagcctttttttgttcggccttaatgtacacgtccaaccaatcgtcaagataagtttcaccaataccggttccatccaacattatcacagttttttccccttcctgccattgtaccccggtcttatttgcactgtctgtaaaccataccatgcggataatcggtgctggtatcggcacaatttcgccattccactgtaccatagctatattcctatgcaggatttcatcaggattgatggaagcctgacttgccggtatgcacgtaaatttgggataaacacgattgacggagaattgctgtcttgcaacctcctttccaccaaccttcaccaacagcaagtaatcccctttctcgatcaaacgcaaatccattgtcagactggttaaagacaaagccacaatttcgtgatttgcagtagtcagcctcgtttgactggatatgctgtttacctgataaagttcaatcgtatatccggtagttattttattcactccctttgttaccataagtggaatggtgcgctcgtatgaattttcatccaaagccgcattcctattagctgtagatgcggaaatcaatttattggctactttgtaatcatacaacaaaagtttgtcaagaaatggattgtactggattatctgactgtccccgatagacaaaccgtatgtgtcttcactcttatctaccgttgtcaacattatggagtcagtttttacggaaatattcacccccaaccgggtatcagctatcacaccttcaaaatgtaactcaaaactttcacccggagccacatttctacttatggtaatggcaccgcgtgtatctccaaccgtatctatactgtactttccattccatgaactgattgcagaaatattctctccattagcaaaccagttcatttctgccaacaaggaattgacataaggcatatcccaactaccgtcagcagcattcgctatgacttccggtaaaatcaccagcggagtaaccccacggtcaggatcatattcatttgccaccggattatagacctgattggccggactgttcggtgtcaatattttcaagcttaccgcaatggtaagcggttgaaattctttcctgattcttttcttttcactttctatcatattgtcacaattgcttctattgatgcagtatcattcgttgccgttatggtaaacaaggtacttactactgttactgaattatttcctaaatcactaatttcctttgtgttatatatcgttattgaaccgttgaaatctttatgcttgatattccaagcctcatcatcggcagtatctccactatcccttcggatagtccattgtctaactgtgtcagtaatatcctcccaacctttgaagaccttgcaggtaatttccattgattcaccataagcaagaaaattatcaccctgcgtatcaatctcaatgcgtaccggtgcatctatctgtaactgttcgattgtaccggtcatataaatgttgttcagataagcggaataaccggtcatattcaatccaaagatgttgagattgttcaaatctccatcctgcattgcgatcatactctttgtaaactcccagtcatttacacccaccaagaaacggcggtatgtccttgtctcataagcggaagtctggcgttctttgtttgtaaaattgccataagcgacaaaatgcaaagcctcacacggatggaaagaatattgccaacggtcagaaacaccacgaagcacatagcggaaccgtttgtttgttccggcatccaatatttctgtaatacgaaaatagattgtacagaaaccggcaaacatacgattgccacggctatcatctatatcagataccgcattattccccggtgtttcataatcatggaaatatcccatacaaatatcatccacggccacagcaccaatttcaccgtcttgcaatttcaaacttatcgtcccggaacgcagcaagttaccatcagcatcataatcaggctcaacactctctataattccagcaccgggagaacgccatttgtcaccaagaactatttctgcacggttgaaacgcaattccggcacttctaaaaacctgcgtaatgtgaggctttccatatacccacgtcccatgctgtctattttcgccccaaagccggttaacccctctgcaaaaccacttgcaccaaaaatagcaccggctaagaagctgataagcccagctgccgtatcattatgggtacgtgaaagaaaaagctgattacccagtgaacggatgatagactgtatctgttgggtattcaagccaccggttccctgcccaccacctgcaatagaatctatctgattttggattttttcaagcgatccaacagccttttcctcccgaagtgtcatagtgtacttcggtatcatatcttctccctctttgataataagggtatcaataatgatgctgccttcaataccaagatcgctatcagtgaatagcatcaagtccccttctttcaaagtatcatgtatgcttgcttctccccttgcaacagcccaatcatgttgacgtgccatgaaaatatcatccaccttcggttcatacgaatagcgcacatagtcattctttgcaagatattttttcgcggcagcaagcaaccgttgtgaagcggcctgaatataaacgtccggcataccaatataaagcaggacaaacttgtcaccggactttatattgtaatccttgtatgggaaatataatttcagactttcatcatatacacggttacaagtcagcacatatttattgcccttcttctcacatttggttatttcaaaatcccggccaccacacatgccgtttttcatgctaatggtggctgtttcagaagtcaggtaatcgtttatattgaaaccaacatcttttagcgttattgtaaaaggtgggacatcttcaccttctttcaggctatccattgtaccatcatctgtcagttgttcagcatcagccacttcgtcaagattaccattatccccggcatccaacgatacataaataccagcatctttcaactgttcggcggtcataccttccattgaaggatatatttcctccaaatcaccggtaccgtcaaaataaacacttccttcccgaatgccaagtgcagcaatattcttgctgtcaatatatggatcaagtgttgtcttaggaaaatcaggtaacatcagattttccacggccatgttattcggcaaataattggtaagggaactatttgagagcttattataataccggttaggcatatttcttgtactaccgtatgcacgcaaccgggtaataatctgttgatccgcatcggctgtacgttgaatttcgtacagaccatttccacgcccatacttgaaaatattgcccacagcaataccggcagtaccgattgttattgtccgtccacgaataacgaagttcgcaccaaattttgaattaaacaattccaacgcaccccatacctttatattgttcacatcaatgtttacgttggtagtgctcacatattcagggtgtacaacaaccgtccatttttgtgctccaatatatatacggtcaagatttacttgaacacggtctgccaaatcttgtatagacgaagcgaaaaaactgaactttggcaaagaagtgaagtgtatctgattatcacttttcacataatcaagaaaatcacatcgcgtcaattcatctcccggccagttgaactttgcgttatcatagacaaacgcttctcccgaagtttttcttgccgccttttttaatgccgtaggatcatagtttatctcaaacttctcgccacggtacataacatagtcacctatctcaaaaggaatgggcacggcacttttcagagtgcttgtcacaaaacatgcacccatccatgtaccattatactccaaacctttcagtgtacaacgtaccgtattgccagttttatcataaaccttccatgccatacagctatactttttcaaccaatgcaactatctttgtcggttccgcaacactatacgaggggattatttgagttcgaggatcagttactctgaattttaccgggaaggtcaagacttcatccatattggacttgttaaattcaaaatctccaacctccagcaagtaaagtccttgccgcccgatacctgtgtgcgagttatatattttcaaggtggcaccgtcaccattttcccccgttagatagttttgaaaggccatgattttatcgtatgcagtacctaaatcccctttatagcacatttcggcctccaagtcgtatgcttttaatggtagcttatcgggtatgtaagtatcttcaccgtcttcttccggccaatctcgttttggtaagtctttcgtttccccacccggtttgaacggaaattcagtgcatacaatcccaaaatgcgccaagctgtctttgaccggagcattctcggtagttttctgcatcaaaatagaatacggttcgttcatatacacatataaaaaaagagcttgccgcagagatatttagtctccacaacaagctctatggccttatactttaatcttatttcaacgcaaatatagttgtattttctatattatcatagaaaataataccataaaaatattttttagtagattatcatactcaaacttcgctttagttccacatgtatgttgaaaaacataaaaaatatcatctgtcataattttaattattaatacttttgtatttaattataaaagaggttattatatgttaggagttttagtttggatagtagtgattcttctgatctgctttagtgttactgggtggcattggattatattttatgtagtcatactaccattttcaacattgctatttttcttctatgtcgattttcccgaaaatcattttaatataaaaagattcaagaatgacataaaatatttattaaataaattatataagaaatgaaaaaaaatatattattctttttgctttatactattatgtgttttacttcctattcgcagaacaaacagattagttattcatctgtaaatgggcttgtaacttacgacaatggttcaggtacgaaagccgatattggtgcaaaattatatattataccatgtaaatatttcaaacaagatatcgaattaaaaaatgactctatacaaatggggtatgaatctttgttacaatacatcaaatggaaagaacttgttgggcaagaacaagcaatagccaaattaaaagaatatgacttttacatttccgctgaagaacaaattaggagagaaggtgaattagctatatgtttggttgatattctcaaatcaaataaagtaaaatatagttgtacgattgacaatacgggaaaatataaaactacaatcccttatggtaattattattttatatttaaatccgcaaataaaagtgtagataagtctatacttaatggtcgtggaacatataatatttataaaatcgaattatattctaaatataaagatattagtacatcttttaacgctgactaccattaaatattgagctaacataatccggctaatgttttcgcgtataaattataattaagctggctccaaagtcagcccaattttattttgtgcattttgccactcttagccaaaagtattcagctttcgagatatttgttaagcgcatctctcaatttacgaatttcatcatttgaagatactatttcggatatttcatcttcacatgcgcaatcgcacattgaaataagcataccttttatgccacctcccttttctattttagcatcttttgagaacatttctatcgggagaaactcgactacccctccgctgtcaaaacttaccgaagccgcagcgtttttcttttcccattcctccacctcactacatgacatataagccgtttgacaattttctaattctggcttcttttgctctatcatatctaaatagaactgtatagccattaaacctttctctgttaccgtattgtcttttgcaataagaccatttactttgaatgtttctacaacgcattctttgttgctcataaattctactaattccatattgatttattatttatagtggataaaatttgtattttcttgctgtaattggaacacggcaggatagttcctttttgaatattgttttctaaggtatgatattaaattatcgaagttggtaatgaatccctcgttgattaaatcagccaccttcttttcaagctgccacagttcgcgttgtttgctttcatcaccctgcttgttgcgaagcattttctcatgtgagttaaacacaacccaattcaatgcttccccaaccttttgcattgctttcggcataaactctttaggaactatcttctgaacggcagagccaagttctttgtaagcatccccggcatcgtttcgatagcgaatcatttcatcatacacaaaccgtaacactttgacttcaaaagccggatttatccacatagcaaatttgataaacagaagcggattcatccaaactttatcgggtgttttgccttctttcgtatttctacccttaacttttataagtagttgattttcaccaatgagcatttttgctctatggctttcatcctctgcaagagctttcaaaaactctgatgtattatcagattctaagaatttactcatttgccttctcggattcccttctacattattccactgccgaagcaattcagttccatcaaaataaccatcactcgtgcgctgaaccacagaaaaactatcaatgtatcgcaccatttcttgatttgttttcatattataaatttagattttacttaacaaagatttctcccttttacgggaaagttcacgcttgttttcttcaagttcttcccaacgattaataattttggctcgtaaatttgcatcataaccacttgcgagaagaaggcaatcctttttggtgagaatgtaacaagacacttctttgcttccaccgtttggcataggttgaggtcttgatgataattcaaaactgaattgtcgtctatcttccagttgttcaaggatattgcgaatatatcgcattacatttgaatgagttttgcccgtaatttctgcaatctgcaaggaggtcattgttctttttttaccttttccctcatcaataggtattaactgattaaaattttccatatctttgcactataaagttaatgttttccccatcagcggctcggacatctccgcttttggggaattattttgtccgatcttgtagtaggcagggaatcgaaccccaatacgccattactcgtacctactgaaccctccttaatataatagtcacgcttgacataataataaagagaaagggcaaatctcgatgaagcctaatgtggttgcctgcctcaaagagaatgccctataatattttactccagttcatgacaaccacaaaatgaacctaacagcattgtttccgacacaaatataaaaacgatattttcaccatacaacagactaaaaatcaagaaaataaattcggtaaacatcagtaacaaacggtaagaatcggtaaataaaaacagttacatttactctaaaatttagacacaatataaataatgcgcgtatctaccgtattgtgacgagatgttggttgtcatttatgataccgttcaaataattttcaaatataaaaggctgtaaataaagatattgcagaacatgcgttagtccacattcattttatatcttaccatgacattgccatcggcttcaactttacagtttttgccatgaacatatacataaactttagccatatcgctttgccttacatgtagtatagcccgatcatatacactcacaaaaactttggcacaatcctccacttcaagagtcaattcactatcatgccgcaaatggagagtagcggctgcaaatttgctgaaagaaaatttgcctgaacatttaccgttcagcacatatacaccgttgtcacctccggtcactggttcatcaacaaaaatatggttttgatgaagcagactccggtcaaaattaccttttatatattccactgtcggataatcgtgctcaatacaaaaatcaatgcctcgtatatacatttcaattagttcttgctggcttttattgttttgccagtcaccttgccattgtgtgcagaggccatacgatacggcatgacctctcaattcactattcaatctattcataatcatacattaaatttgtttacaccgtttatattcctatgcagtatatctctgatctcttccacaaattccacattctttgctgtatttatctgtatcattgtcagttgtcgcaattgtgcttgtgctattacattataggccgggaacaattcttcaaccaatctgcgtacatactcccgtttgacactcacatcagcccggattgcatttatataagaagccaaaaggttagcggtattttcagtaacattctgtatgcctttagataacccacttccattttcttcttcctcttctttcatgctgataccatatttcttttccatatagttgttcagcttgtcaagcatggaatagtaatcatcggttttctcactcacccccattagatagtccgcaatactttccaactccctttcgtcaagggaaaaatccttgccgaaataaccactcattccatcctcaccgaaaagcatcttctgaagctgttgcatggccggttccaaaatacttattttgagaatggagttcataacatcacccataatgtcggcaaccttatttttgaaagcttcggcaccatcctcgcctttctgccatgcctcatacaaggcatctcccaactgcgaagcccagtctttcaaattaataccatagagagattcagccgtttcctcggcaaaatcctttatttgctgtttcatctccgcaatctgattctcataatcagctaccttgctatcatccgtcttctttttatcaatttcagcttgccgttgtttctccaactctgaaagttgttcttgcatcaaggcacgttgatacccgtatgcaccaccttcatcgtatgccgaaacacgtttttgaagtttttccgcctcctgcttatatttctgcaaagacatcaaatcgaagatgttgatctttcccttattgcgtattgcctcaatctgattatttaattgattcaaccgggtacggtcattttctgcatctacaagttttagttccgtgccactgcccaagaaacgttcaagaataccgtcaatttgttcgtatatatattgcaactgttgagcacgaagtttactcttttcaatagccttatcgagtttcttatcatgcgcttgtgctatcttcccaatccagtttacagcttcaccggcagcggcagcaataccaccaactattccacctttggcaaatccctgcccgatattgcttatagaagacatggcatcctgcacattgcccatcgtgtcggccatgccctcattgcccaaagcatcgaacatggaggacatttgccctgcaaaattgccgacaagatcagcactttcagcggcactttctcccaaccgtccgattttcttttccagtttgtcgctacctttttcagaagtaaaaagttcttttacattcttcgctaaggttttgaatggatttacagccaactgtgcatcttgcaactgggggatagcttttatcaatttatccaacaaagaataagcccccttaacattttcaatactaccatcatctttcgtgaaaaaagaagtaaatccattaggccttccatcgctatcataggaaacctttgcattattcttgatttcccttgcgatacgttcagcctctttcaaatcagagaatgaacgttgctctttatctccaaatattttctcccattcaggtaacaattgtaataaggtcgattttaattcaatcagcttcttattatattcatcaaggtaagccttctgaacattgtttagacctgacgtatcaccaaccaactccccattttttccaacatttaatccagtctttgatgcgtactgttcacttaatattcgtatcttttctatcgttgatcttgcattggcaataacctttgtatcatcaagtgcaatacttaccttatctttctcaaatgcctctttagcatccttccacaccttaaaaaattgcttatataatgggctgtctttacctcctaatatactttttgcttcatcgtcactcaaagtgaatggaagatcaacacctttttctttgagtttcttttgtactgtatctattaaatattgcgcttcattctcataatcagtcaaaaaaccaaaagcataagttgaagcatccttcttacttgccccggcattgataagttgtttgtatatatcccatttctttgaaacatcagatacgtacctttcaagttcttttgtaaccttatccgaagcttctttcatagcattggcatcaatatccaaaaggactttccgtatagaaactttcaattctctacgctctttggtcttatcgtcaagctggttaagaatcttattcaattcatcccgataattgccaatattcacaggttctttacctttgaataaggagtcaaaaatacccgatcctttaaccttattggcagcttctctctttccaacaatgtcaatccacttcttatattcagaatatgcctcctttagtaagtttacccgttctttcaatctttcggcgaaggcatcctttttgctcttatccttacttggatcagtgagagaaaaaccgatttctttggctcctttctcgccggcttgcattatgtcgaaagcctttttataatctgatacaatttgcttctgccaatcaggaatctttgataagtcaatggttccaatacctgataaatctattccagccttaatcaatatcggcttcaattgatttgttgtctctttcgcttccttgtacgctttttgtattccttcaatgattttctctgaatctgtggaaacctttatttgggcttcaaattgcccatctgtagcttcattgaactttttctgcaaatcagaaaaactttgactggtttctgtatattcagcattaatcttgatattaaactcttcttcaagagtcttctcgttaaagaagtctcgcatatatttcggcatcttctcgaacgtatcaaagaaagaacttatatccaaaccgatagctattttctgcgcatcactcaaattgtccaaatcccagccggcagcttccagtctcgacttgtacccagataggaagtccttcatatccggcaatacatcttccatataaatacgcttagaatttttccacgctttccgcaattgaaaaatatcatctctatatcctccagtgaaaggcaactcattattcaggctggccaacgctttagggtattctttgagaatggaaagctgctctttcaacggtttacccgaagctgctttagcaaaatcatcatgtttggttataactttctgcatggcggtagaatactcgatatagctgcctgacatgcgaccaataatcttatttacccgttcctccgctttgatgtagtcattgatatttccaagaaagctgtcatcaaaataaccgtcagtcgcttcattggcatgttcagacgtaccttttatgtcattaagcagtctataagcctcttttgtatcattcaaagcattccgaagcaatatatattgttctgcaagacttttaactgtatttccttcatcatcagtcttaaacgtttcattaaaagtgtctgcccaaaccggggaataatcctttaatgctgttttcatttcttcaatggaagaaatcagtgaggcatcattcgccttaaaaggatcaacatcagcaaatttttgagcttctttcgttaggttcttgaaaccgtcttgtgctcttgttgtcaactcggaaatacgctcgttcatctcgtcagccttttgcccggacttataccataattcagcaatagcagtaagcccagtaaacaaaagcatgtatggattaaaaagcaaaccttttaatgcaactcctacttgttttataccataacccaatgagatcatggctacacgccatttacttgttgaaagtgcagccgacatttcagcacgagatataccaagtagctgcacaatatgaccggcttgtcctgatttcaattttccaagtgccattaaccgcaaggcatactccttagttaaagctccactacttgccaacgctttccaatctgcggttgtcatagtattacttgaagctataagtcctttttccgcattagtaagtgtacgataactggatgcgacaacaagattggctgctgccttttgcttggcagcaagcgtactttttataagagccgcactttcattcccaatcaagcggtttgcgccaaatgtagctaccttatatactccaaaggctccaacggcagcttcgatagccggtacaacttctttccaattttgtgcaagggtggtaaggctttcggcagtccatttcaatgtactacccattgactccgcaatatcaccaagcataatgtcaatcgcatcagccaagttcttccatttggacttaactgattctgaaagaacttcctgcatgttattaaacatgccaccatcatccgtaagttcccaaagaacatcttttacatcctcaaacgtaaccttctttttcgagatcatatcaagcacttcaccggcactgacaatgcggccttccaacttgctgaatcgctcggccagtttatccaccataggaatgttcgcttccgtcaattgtcgtaattccgttcctttcaagaatttagcagcctttatctgaccgtaggccaatatgatacgccccatatcaacacctacaccggctgatatatcagccagccttttcatggtatcatacaattcattgtatggtatagaatatgcggaaagttgcttggcatactgattcaaatccataatcccgaatggagaagcaacagccagtttcttaatttgattgaatatggttgtagctttgccttcatcttgcagaatagaggccattgcaattttctgattttccaactcaccaccaatatcaaccactgcacgcaaaaagttctgtgctgcataaatggagtatagccccaaaaattcatttcttaattgtccgacaatactcaattgactgttcattgctccattcatattgagagtggctgtcatgtgccgtcttgctgcattggctgatctctcacgggcattagccaaatccagttccgctttggcggcacgggcggctctttgtcgcgcaagctcacgtgcggctgcggcagaagcttccgctttggtttgaatggctgcggctttggcggcgcgtaaatcacttgctgtaaagtttgtattcaacccggcggcttgcaaggcggcacgaacagcttgtgtggtactggccttatccactaccacattgatcttaaacttctcactttgaagcaaagtcttcatatcaccaaccaacttcttcttgtcaaaacccacatcaagttttgcctgcaagtctttggtgatttccgctttcaattttttacgttgttccgctgtcttatcacggaataaaatatcgaagtaaaggtttccaagatcagccatatattattgtgtttgtattacttataatcattgatattaattgctgtttctccattgccatacttgtctttccagcgtttggcagcatcctctatatcacttacggaaggggatttgaagttttttgtatcgtgtttctttcccttgctgtctttgtcacaatctgtaaccacaatagacacatccattgccaacaattcaatttgtgcatttgtaagtacccaataaataccaaacaaaggtttacttattggaatcccaaatagtctcaaaggctctgtcaaccacggataggacttgcctatttcccacgtttgtccgtagctggttcgtgaaggatatgctctgcttcctcttttgtcattgtcatcatcgtgtccttcatcgcggtcagatatatggtagctgtcaagtagtcttccactggaattttttttttgccgacagctataaccttcatcagctcatgatctccatattgtttgatataaaagaaccaacgccacaaaaagggatagaggaacttgattttccaatatccattcaaaatgatagcggctgcacattggcagctgatcttatcatcattccctgatttctgcatcgtactggtgaatttgcgtatagtccctcttttcagccacgaaatgccatatttctttcctcggacttccacataatccacactgtcttccatcacatcattcaataatttttcatcctccgatttaggaagtgttatattgttttcttttgtcatactttattgtgttttatacgaaaaaaaaggtggtggccggtatcaagtagctcaccaccttttcgctgatatgaattttgcaaagtgttatatcctaaactttttagtcggatgcttttttacgtaaaatgtaaatagaggcccccttagcatcattcaacggagaaacagatacattaaagtaccccggcttgtcctgctcgctgacgaggttgctatacccctcgatattcggtaagaacaaggctgtttgacggtcttcactacgcatgaagagtcctccggttactttcttcggttcaatattgtaaccttcaccttcataagtctcaccatcaatcgtagtagtcatagtcactgtttccgctttcttgttcagtaacaagtcattgatttttcctgccacggaaggtacttgaaactgaatatcggaatctccggcattagcaacggaagtccaagtggcaccggttgtcaacttgatcttggaaacatcggcagctccggtatcaaatgtaactccatcagagagtaccggtagctccatatcaaaagccgctaaagttgcgaggtcactattgactttggacacataataaacctccttcatttgattaaagagcacctttaactcttccagtttggtagtaatagaaatctctgccataatcgtatttttttaagtttgtgtcatttgtttattattagcttcgcttgtataattaaagaatgaaaaccgagtccgtcatttcctccgggaagtaatcgtggacttacagctgaaaacaattccgtcactattggaaattttgaaaccacttccatttgcatttcatccaaacggactgtattctcaataccgtttgagcgatcatgcgcaaagacgtttatctgacagtaagtgtcttggtaggtacttcctttatcttggatagtttgtggcagccggataacaacaaagtccttcattgccttttgttcagcagccggacgatctgttataaaaactttttcactaatgccggttactgcatcagcgatttgttttaatatatccatacgtctataaactatccgtcccattatctcattggtttaaagttcttgaacaatgtgttttgtgccctttgaaatgttccggtcagaacatctgcattcaacacattctccaaataggttgaatattcagtacccgtacacattactatctcaaaccctttacgtgattctgacttatattttttcaagaaatcaaaggagaatgcttcaccataccccttatcagtttccaccgttccggtaaaacgtctgctctgattatcataactgacacctacaaatgtttcacctttagtcagcttcactctcaccggctgtttcattgaatcaccactacaaacgaaataggaaaatctaccgtccatgaataatccgcacgcataactggttattgtattacccgtaagattccgaaagccggacttattatcaagtgcatcttggataaggtcttcacaacatttaatcaagacatcaaagatatatcctgaaacaagttcctttgcttttttcattccttcgtcaaacaatatgtcattactccggttatccataggttaattctttgcaagattgaaatacacagttgttcccaaatttccagcatagctatcagtaaccatacattgagtgaaagtgccttgtctgtccgtaacatctatcaaatcaccggccaatattccttcaacaatttcgggaaggctcaacagataatcgctttttatcacattatcagttttgaatgttctcaaatttgtactaccttcctttcggcatataccttcatacaagatcactttcttaccatcactgaaagaatcctcacctataattcggtaaacagtacatttgtgcggatgccgtggattgttcactttcatactcaaaaattgacaattctgattttactaccctttacaacttcttcatcccatttttcatacagttctttcgccatttcacgtagttgtcgcttgtcgtatgcgctggtctgccaacccccttccttatgcttccatcccccgtcactgtcttcggtatcattcttactgcttggagtgcttgcacaccacatgtaaatatcggcagtggcaagatcaagctgtctttcagtcagttcacttaccattgttccaaaagcgattttccgcttgacaagaacccttttgagggcgttatccgctatttcataagcggttgcgccactcaaaaagtcctcaatggtcatatcttccgtatgaaaaagttcctcactcattcttgcatgaagttaagacttacacggtcacagtagagataaacatatactgcggcattctcggtacacacatttgggcagcttcactttcaatataaattgaatgagtttcaggattggctctctgtgtcagtttcaaacgtccaccgtcataagaagcaaccttgttagcctcgtaacccaaagtcaaaggttccacaccttgaatggtaccgatctgacctaccggtatgaatgcaatgttggtagccttgaaattttccacttgttcagtgataagatcaggctgtccgtccgtatccttaccgggtttatcaacaaaagcatagctgtcacgtggtacgatttcatccaccttaaccaatttcttgaaaatggctttcagccggtcttcatcttcattctgtgcattggcaataactgtactatcatccgtaacagtcggatagagggaatgaccgatacgtttaagaactgcggtatgagtcattaaatcatcccacaagtcctgcgccagttccatcctaatcttgcctaaataatgatatttacggcgaatctctttcactctgttctttatatccataatcggatcagaggcagagccttgatttgccggaatatgttcatccttaatccaccaacggcttgtaccggtcaatacttgataatggttttcagggatattaaaatcaatagtgatacctttcaagccacgtgggttgttatcagtatcaatagtgaacttacccgtggaaacaattctcattcgctggtgagtaagcgcattgtaatacgatccgataagaccgtcagcactttcatcaagcaagcccaagaatacattctgcatctcttccgtcaatgcggacatgcctacccgttgcaacagttgtaattgttgtcttacagtcacacggttcaaacgatagaacttcttttgagtcgggatgttacccgtccgtccttcgagttctcccaatgcagcttcatagcccggactttccggatcaacgtaagctggcagcgttttaacgccgaggctcgtaataagctgggagaaagtataatccaacttggttgcttcaaattcaaaaccatcaatttggagaaggtcatacttctccttgtaacggtcaataaattcttgccaagtgtccccaccaagcccatattcgataaccttgtacaaatcaataggaagtgtattcatacaattgtcgtgttttaaatgttattttcaaattcttctactgcacccatacaatttgaggaagtgtagtaatcttttgcaggatagcaaccactttttcgtcaaacatgtactgataaatctctccggcatagactactgtcccactggccttcgtgttttcactggctacaagaacatcttcttgcaaatagccattaataccaagagtggtaatatctgattcagccgccttaatctgttcgtccgtataggctttaaaagtcttgcctgaaagatcaaacttcactgctgtaccggcaggaatcttgccaaccgcaacccaatcggaaatgttactcaccataccaccgcccggataacggtgacggatttcacgccacactttacgggcatgtccgtatttcacagtgttcacatcaaacgtgttacccattgttcccatacatttactgttttagagttaataatttcaattcttcttccagccttccttcttgcctttacgttcaaagtatctgctggctgcattgtgttgtgttccacctgaaccgtcagaagttcttggggcagtgccatatcccctgcacgctttatattctgcatcatatttcggcagaaattcagtaaccagttcatccacagttttcttggtatcgaaagttaccccttgtaaggtcttgctcaacacataatcatcattcgcttgcttggccttcattgcagccgtaactttctttagcaggtcagcttgaacctttttgctgtcttctgcatctaaacgtgcttctaattctttcagcttcttctccagttcatcatcgtttttcggtggtaccggtggagttggaggtgtcgggggagtcggttggggcttatagtttttcttaaagtcctcaactttggttgcgacatcgtggttgtattgcccttgcatccctttcagaaaacccactgctttgttccaataagcctcgtcaggctccgaaccttcggctatgggattaagttctatatacgtctgtaatgtctgcggtgaaaaactggtttctccaagtttctcgcttaatgtggataagattttttcttgttccatcgtgtttattttgtgtttatgttgaataaaaaaagagtcagacaatgctttttgcatcaatctgactctttggtcttatttttcatttaatagtgggcagtattggactcgaaccaatgaagacgaaagccaatagatttacagtctatcccgtttgccacttcggtaactacccgttttgcggaagcagaaggattcaaacctccgaagcctttcagcttgcctctttagcaaagaggtggtatcgttcactcacccatacttccaatatgcggcctacaagacatctctgtgaaaccaccgcatttcccttgtacttcggacgttattcattttgtgtagcgtatcagagaatcgaactctggtttccaccgtgaaaaggtgacgacctaaccgttagtcgaatacgccatttgttgagatacaaggatttgaaccttgaatagcagaaccaaaatctgctgtgttgccattacaccatatctcaatatgcgcgaagagaaggactcgaacccccgacaatcaggtttggaatctgacgttcttccaactgaactatctccgcttcattgcgcccggtgatagaatcgaactaccaacctttacattaacagtgtattgctctacctattgagctaaccggacaatatacctatactcacctgacctgcgatacccccattatggcgtacctgtgggaatcgaaccacaccgtataggttttgtggaaagagatgaaatcgaatcaccttaaccggattttcagtccggcgcatacaccacgtctgccatctttccatattctccctttatccccatacgccgcatcgaagggagaaacaatgcagcaactccaactattgttgcggagattcgactcgaacgaatgacctttgggctatgatcccaacgagctaccagctgctccactccgcgatattatcctgaaaactactttgtacctacaatatccacatttatgtagctcttgcatctacgacacttcactctcaatataacaacaccattgacatagcttatatcagttagtttctgaccgcatatcggacataaaactatcttgttgtatatttccctttgatctgcatctttatccgcactaacttttatcatactccatgttttcgttgcaaatatatgtactggatttcttttctcaaaacatttttgatattattttctattaaaatgtagaaaataatactctttatgcgtatttttgtactgtaatattagaatcagagcttataggccggtctccacatgtgtaatgtgaggatcggttttctttttatggagaaatatagtggaataaaaacggttaatgccagtttggtgcttgattatgaatatatccaaatgttaagggacgcggataggaaaattcctaatccgaataagataatcgcacaaggtggagggcaggaaaacatgctctccaccccggctgatattaccatctgtgggggatgccgtgggggaagtaaaacttttactcttcttatggaaacattgaaagatataaaaaataaaaacttccgttctgttcttctccggcatgagatagacgatctctctgatatggtagaaacatcatccaccttatatgatgattttggggaatacaacaagtccaaaaacgacatgcgttggaatttctataaaggtggatttttaaaattcagctatcatgctgacacacttgacgatttcaaaaagcgttttcaaggtaaacagttcgcatatataggtgtggatgaaataacccacatggaatatctcaaattcaaataccttatcacttgtaaccgtaacgcctttcatatccgtaaccgctttattggaacatgtaaccctgatcctgacagctgggttgcaaaattcattgactggtggatcggagaagacggtcttccaatcccggaacatgatggcagagtccgatattgctttatggacggggacaatgtttcaggtatatattggggaaatacccgtgaggaagtatatgagcaatgcaaggatattatacacgcctactggaagccggagtatgagcaatatggtacaccacaagaactgtttatcaagtcagttacttttattgaagcaaaactttccgataatgtaaaactgatgtcttctgatccaacttatttggctaaccttgttaaccagtcagacgaacaacgcgcacgcgatcttgacggtaactggaaatacaaagctgccggagatgatataataaagctgactcacatggaagccttataccgcaattccatgcagataggtgatggaatacgccgggtatcgtgtgatgcggcatttgagggtggcgacagtcttgtcatgtggctgtgggaaggatggcatataagagacatatttgtttgcaaacttgacagcaagaaaacagtcgataccgtaaaagcaatgctggaagaatggcatgtaagggaagaatgcttcacctatgaccttaacggactcggacaaatattcaaaggttttttcccgaatgcaatcccattcaacaacaaagaagccgtggaagagaaattcaaatacatctatgcgaatttaaaatcacaagcggcatatctgttcgcacaaaaaattatcaaccgggagatttccattgaaccgactcttcttgaacgcaagttctccggcaaagggtttgagaaagttccccttagacagattctcgacaaggaaaggaaagcgatacgaaaggatgaagacagtgaagagaaaggctggactattatcaagaagattataatgaaaaaattagtaggccattctcccgacttcatagaagcattgcttatgcgaatgatttttgaaattaaacataaacgcaaacacataaaaggtttaggattaatatgatagcagagattcttacaaaaaagccttttgcaagggttactcccgaaggttacttgcaaggcaggattacgagcgatttaagaaacgcatcgttcacaaacaatagtgagaggctgacatggcaactcatttcgcaggctgattttatccgtgagttttatccttcagggcacaagatcaattcggaattgttttacccggatagattgaaatatgacgaagagaagaaacggttcttccgagaaaaagtgttccgtgcctcttttccctttcagatgataatcactattcaacagcttgtacatctatgtggcaatgacattcatcatgagctgaccgataccaaagtcgatgatagttcacgggaaatatttctcgaatttcaaaaaggatggctggataagaatatggaaattgcattttacgaatatgccaaaagtgtaaaaataacgggagatgcagcaatcgtattctatatgaatgaaggtaaggtattcaccaagaatctctcctattttgatggtgacactctttatcctcactacgactccataaccggtcaaatgacactgtttgcccgacgatacagtgactatgacgaagagggaaaggaactcatttcttgggtagaagtgtgggacaataaaaaaatgtaccgttaccgtcaggataaaaggggaatagtcggagcaataaacaaagtgaaacagtatttcggtattgaaggatatacattagtggaagaacacgatcatggatttgccgaatgtccggttgtatattatcgggacaaacacggtgcttgctggagcttttcacaagataatatcgacaagtacgaactggctatttcccatttgtgtcaaaacaatatggcatacgcatttccgatcatgttacttaaaggagaagatgttgaaattcagggagatatgtatggtgcggtaaaagctatcactatggggaaggatgatgatgcaggctttatgaatcgtcccgaagcatcacaatcatttgaacttcaaattaatacattacttaaaatgattttcatggggagctttgttgtcatgcctcccgaagtaaagtcaggagatttgccgggtgttgctatcaagctgatatattcaccatccttggaaaaagccatgattgactgcaaggaatttgacgaatcaatagacaaaatgaaacggttgtttctgcacggatatggaacagaaaaaggccaacttaccaaattcctcaatttgaaaattttttcgtgggcagttccatacgtccaccaaaatgcagccgaattggtatcgaacttggtacaattagtcagtgccggtattttatcgaaagaaaccggctcggaagaatccggttatgggaaaaacaatgaatgggatcgtatcatgcgtgaatataaggaacagcaacaagctgacttgctatatcaactgaaaatcaagaaaaatgaaagtaaagagggtaatgcaaaatgaactgtaccaaaacgcggagcgcgaaagcaatctcgtactccgcgctccgaatccaatgtaactatacatcggaaaaagccgcctctgcctacataaaatagacagaggctttactttttcaacaacttggttgataagcttgtgttataacaagtcaacttctacattgcaaatgtaatgaatgagttgaatatgacactactttcgatacaattttttattataaggctttcgaggatatttccggttaagcttcttttgcaaatcatcactgatactttcattcagaagtattttagaatttagcacccggacttctccagtaagttccataatagttttggcttgtgtcgcattttgttttgaaagctcaacattggcaatagccagtttgctgcattctgatgtaagatgattgagtttctttgtgctgattaatgatattccaaacataatattctgatatttaatctattaaataattatattgctgatacgggaacagcaaagcatttacaatggccgtgatacggtggtaatttgtcccattccacatgaaatccgacttcatcgtcacaaatgttacaaggataggagctgccacgcatgacaaagaaccctatggctccactggctttagcttgcaattcccaatgcttcatccaaccctctgccacagcatactccgtcaaatctgacagtgcagtccaagagcttacagtacgtcctactccaaaagactcctgaacaccgattcttgaaataatagaataaccctttgaaatagctctctgtatatgctcattaagcaatggcgtttttaccgactgcctgatagatgaaagtagtttgtctttggaaaggttcagtagtaatccagcggcaatggccgtttcaacctcctttgaaaaccggtcaacatattctcttgcgcgttgtgtgaaggttttgccgtatgattctcgcgttatatatgttatgattacatccttattgtcctcatgtgtcgctactgccaaagtataagtatagtcttcaattatttcaagaagggataaaattatggcatccacttcctcctgcaactgtctgtttgctgcaaaacggaataattcagggctgatcttgtaccggtatgaaatatctataatttgttttgccgcctcgatcatcacaatttgaagattagtgcgcatggacagctccgcatccagacgttgacggagatattctttggcctcttcaatttccttatcagtcggtatcctcatttttacgttcctccttaataccttccttgatactattcatgcttctttcttcttccagtatcttggcatcatcttccggtgataccggttgctgcaagcttcgtagccgttcggtaagatcagaatagcttttaaaaaattcttccataaacttaacatcgggagttgcattactgataaggaaacatactttgatccatgtttctaaatattccttaattccgcaacactattacaaatataactttttaagtacctgagcaacaaaaagttgctcaggaatttgccatgtcagatttttcacctatcttagtgttgcaaatcaaaatatgtatcaaacccgacagacatggcaaaggtagcaattaaatccgagaaactcactccttttggaggaatattttcaataatggagcaatttgactccagactctcatctgtaatcgactcaaccctcggtatgagatgcaggctgtatggttatcaatacagcgaaatcatccgttcgcttatgagcgtttatttttgtggcggctcatgcatcgaggatgtcaccactcatctgatgtaccacctttcgcttcatccgacacttcgcacatgcagtgccgacacgattcttagagccataaaggaactgacccaggataacatttcctacacatccgacactggcaagacctacgacttcaacacggcagacaagctgaatacactgctcctcaattgcctattgtccacagggcagctgaaagagggcgaggggtatgacgttgacttcgaccaccagttcatagaggctgagaagtttgatgcgaagcctacatacaagaagttccttggttatcgccctggcgtggcggttattggcaacttgattgtcggcattgagaacagcgacggcaacacaaatgtccgtttccaccagaaggacacgctgaagaggttctttgaaaggtttgaacaaaacaagcttattatcaaccgtttcagagctgattgcggctcgtgttctgaagagatagtggaagagattgctaaacactgcaagaccttctatatccgtgctaaccgatgcagttcgctctacaatgacatctttgccctcagaggttggaagaaagtggaattgggcggcattgagtttgagctggcctccattctcatcgagaaatggaaagggaaggcataccgtcttgtgattcaaagacagaagcggatagacggcgaactcgacctgtgggaaggagaatacacctaccgctgcatccttacaaatgactacgagtcttccgagaaagagattgtcgaattctataacctccgtggagggaaggaacgcatcttcgatgatatgaataacggattcggctggaacaggcttccaaaatcctttatgggagaaaacacggtgtttcttctgcttatggcactcatacgcaacttctataaattcatcatggcgaggcttgacgtgaagaggttcggactcaaagcaacaagccgcatcaagacgtttgtctttaagttcatctctgtgccagccaaatgggtcaggacatcaaggaagtatgtgctgaatatctattcatgcaacaatgcttatgccaatgtgttccagaatgactttggataacaccgacaacttatagtcgtgattttgcgtattgcctcaagtcgcatggtggggtaaggggcatttatatgtctttatggtgacattcgatgcactgtgccccctttttactaacgatgcagattcttttcgcttctgtatcatattaggcgcgtagttgcggatttgaggatattctcgaagttccttattgttggctaactcccgaatccgagagaacattccgttgtcatcccgaaaacgcatactccaaaaacctgacactgccttaatgctgatccagtcatgttcactaccattatctctcgtaacaataaagttacctacctgaataccgtttgtttttttgcccatacatgtctttatttaattgtttctcaatatattgtttccttttatagcgcatttttccaatatcaaagttatacctccaccattttttccttatgcaaaacagatgtgtcggaattggaatgcccaaatgcacatatctatatgcagccttttccttccaatttctactcataatcaaacatctacaatttcaaattcatccgcatgtttttctccaatccacagtcttttttgattttcagtagccgtctcataaattcttcctctcttggaaagatttcttttcctgaaaatagcttcttctcctaattcgttatacatttttattgaaggtgataatccctttgccctgcaaaagaacagtcccgtttccttatgtctaaattttactgccattcttattcctcccacggattttcatcttcttcctcaacgtaaatccgttttaatttgtccgatacttcttttaattcacgcttcatttgatttatatgaaattcaactggcataggaatttccaatgctccccgcaggttatcaattctttcaataatctctgcaaattcatccggtgcgatcatactatttggttcttatttttaattgtttgataatcttctccacagcgtccaattcaaaaactgttgttcttttctccatgtggtacgtcccttccagtttcttctcccggaacaaacgctggacttgataaatgcttaatgacaagcaggccgcaagtccttcatgggtataggcatatcgtttgccatctttgtaaaccggtttggcgatcctttgcttatagttgccccgtaggtcttcccgtttctcataatagagtttttccgtcaaggctgttccatataagccatatacctgaccgttcggggttctttttttgcgataaccggcttccgaaagaatacgtccgaatactgtcacattctcttctttggcattattgtccttacaccatttgcagtatttccggtacagaatggccgaagacatccatttgggttcaatatcggcaatttcctcatatcggcacagatagttcatttgatacatgaacttcattacggtactactttccgactgatattcatccatgacattttcaagttccttactgtccgtcaacttataaccattggcgataaaacggtcacgaccttccaatatccagttgaatatagccgggtattcggcttccaaatcccgtgacagttcttttttctgccgggctttgggtatctccacttcaaaaggaataatgcaaatacgccgtctcattccatagctccaatctttcaaatatggcatttggttggcatttgccatcaacaagggaatattgtaagcagtaaagttgtcaccataaataggccgggcttcggtaggctcaccactaataagacttttcaacgtgtcactatccttaccaaactctaacgcttgtatttcagaacagtagttcaaccgcttgccattgatgaaagcgatattcttttttctttcatttccagtaatcaatgcacctataccgaaattgctgacattctcccggccaagtatgcccatgattgtttcaaaaaccacactttttccattggaaccggagccacgaagaacaagcattgtttccattttcgccacacgccggtcaacgaaaatacttccaagaaattcctgcaaaactttttgcatgtttttgtccggcaaaacttcatccaaaaacattctccaaagaaagacatgttcttccggcttgtagtcatagggaacgcatgtggtctgtacccaacggcggttgaaagaatgcgcacggcgagcactcatatcaaacacgcaattgttaaataccacaatagcattatcaggtttcaaggcttttcctgccactacacgcttacagactttcaatacgccttccacgcgagaataatcgccattgggcatcttgcatttacgcatcaagtcatatatcaggttgccaaaatcatcccatgccatctcttcatatatccggccactgaaatagtaaggcgtaccattgaatttacaaatcgaagatcgtataatggctgcacgcattaagtcctgcacagcatcaacacgagctgcactcttggactcttgtaaggcagcatccagtttctcgcctttcataagtccaaagacctcattcaacaacttcctatactttcccttctccatgtacaatctatgaatttgaatatccggcacgagttaaagcctcaaccatatatgctgacaagttatttatggcaacatcacctaaatatccgcatcgccacaaatcagcacgccaatcctctaaagacgtgtcacaaggtatatgatatttttgcataatatctcgcatcaccgcacaatcttcatatctttcctcttcctgcgcttttctgaacacagaaacaaaaacgtatcgcccataatcaaacaatatagactcaaacttattcatatcatcatttttatacccgaaaacaaagcatttctactgtttttatactatttttcaagtgtttttatgccacaaatatagcttattttctacataattaccgcataaaagctattattttctacttaaatatagaataaatacgcttttttgaagtcttttttgttatatttttattggtttcatcattcaatatcaataatcgcaaaatattgataaacaaaggaaaacggctctatttcaatagaaaatacagatgaaacattctctctgatatgtatggtttatgtagggttttaaaggcaactatacatatataacatattgaaatacaaatcaatggaaaaatagtgcatagtatgtatagttttttatgcaaaccatatattatatatttttttccatacgcaatttacatataaactatacatactatacattaaatttccattgacctaataatgaatgatttacacatgtatggttatgaagtaaactatacatatactatacattttcagaagtaaaactatacatcggacattcacttttgtaatttatcattggaaaagccttaaaaacatccattattggctccaaaaaagaaaaaaaataaaaatcttgaccgggattgaaacatgcttggtgtcttgggtagccgggggggtgccctccctgctttcattatccagttaaccagcaaagaaggagaaaagccgcgttttgtcttgattctctttatattatacctataatattaaatattatccggcttttccgcttcttctgctttccgctttgctcgatcagctataaaaaggctgcatctataacactgcaaaggcagataataatgtactgtttcctcttcttctgtattttcgtccttcttcatctgttgtaaatcggctattttcattaatacatctgcacgatctttccccctcaaataaggcaaagtttgttcgagacctgataaaaccgcgtctttatctcggtattgtacaacattcccggctttttcttcctcttctgtttctgtgtttttctttttcttcttgtttttggggctgtcattgtcaggaaggaaggccgcgcggttatcttcaaaagaccgtattagtttattaatgccgggtttatcctttgcaagctgggcggctccgcgttgcgctgtttctatctttgtagatcgtggtctaaatatagttgcgtatgcttcgccacgactggcgccggatgctacaagcatacaaaagaaaacatcatccggggttaattggtaaatttgctgtaaatctgtcacgcgtttactatacaccatataaaacgatataaaaggggttattatattggcgtctcgcgctctgtaacttgctacaaagttaaacaaaggctataaataaagcaaataagtatatttaaagctgcatattacaaatatttccttacttcttaaatactttatatttatcattgtattatttattaatatgttgattatcaatatattatatcaatattaataaatgtaaaaacggagcattttcttaaaaataaaagtacattttgttttgtattacaaatattattagtatctttgtaatacagaaaaggagataaaagaccggatcaccttccacaaattccgcttttacttcttctttggttgaatgtttaatttaaaatataagatcatggaagtattactaaacttacaaaacaaaaatgtaacgttaaacgccgtacatgtagccccagaaggtacaaactgctgcaaccgtttgaaggttcattttgatgtgtttcaagaaacagcgaaaaaagccgctattataagactatcaacggcaaatagttttgaactgattcactatcaggataaacatatagcgttattaattccttttgatcgcattcaaaagatttcgtattaataaaaaaccgggtcgagtttggcgactcttcccggcctccctttaaactttgcgtttatcggatcaccttccacagtgataacgcaaagttaagggaaaaacaaagataaaccaagtttaaccctttatttttttgcgttatgaatacagatttattaattatctacattcgcaattctcgcgatatttacgcgcttactgaatggctgcaaaatacacttttgaaaaaagtaaaccgcggcttaactccttccgttgaatatcttgcaaattgttctactatgaaaaagatcgtccggatggctgcaaaaatgctttccgatcaggatcataaaaccgcaaccaagcaagaaaaagaacaagcagcaagagaacacgcggcctatattatcggatgcgtggaatatctttctaaattctaataataactatttttccggggctgtcatggctccgggttactatttactttcattattcacctttaaagctttgtattatgacaactacaaatagactttcttacacagcatcaaaaagatatgttcaaggcggtacaacctttgaaatcaatgctaaaatattactggctgatgattgcaaaaataatatatgcaattggagtataacggcagatatttacgaacaacgcaaaaacgggcgtttcgtttggtgtgctggtggttgctgccatgaagaaattctaaagcgtttcccacagtttaaaatgttcgttgatcttcatttgtctaatcattacggcgcgccaatgtacccagttgaaaacgggttttatcatattacgaacagcagcaaagaaactgcaattaactacttgcgtattacggaaatggaatataatttgctttatcaagcagaagacaaacaatactttaaatacctcctttatgtacttggtatcgttgaacgctggaaaagagaatctaacgaagctttaaaaaagctggaagagttgaccgggcaaacatgggaaaacccatataaaccggaaaacgaacgttttactttgaaattgacggaagaagaacgtacaactataactaacagaataaacgaaggttattatcgcttagaagctgtacaagcgcggaaagacgaagaaaagcgcaaagcatacgagaaaaaacgcgctgaaataattaacgattgcaaaaagaaacaacaaaaggccgaaaatgaaaagcgagttatgttggcggttcttgatgccgggttatcattacgtaatgtaatatattacgatcatagtaacgagcttgtttttaattggaaagactacgaaacaaaagtaacggagaacgattttaataaatttgtttccagtgttaaccgttctttgttgcctgctggcataacttttaaaatgaaataaaaatgttttgtttaatgctgcttttattcggtgccgtggtgtttatctccggcaccgatcccaaaaaattaaaagactttataaataaagacgatcaatcagacagattttaaatttatggagaaaaagatattatatcatattgggttatacggatttagaaagcttatagtttatgtaataaaggataacggggatcgtacgtctgtcgttagtcttaatggaaacggttcattccctttccacgtttggaactgtaatttacataacataaacgaataatacaaataattccaccgcgccgggcggtttcccggcattcctttaaactttgatattatgactacctatataatagaatccccaaacggagaaacgcacaaattagaagtattccgcaccgcaaccgggtttagtgtttatgttgatggctcaaatatatgtgagagcataacggaggaagattttttgcaagagcttgaaaaccctactttctaacatggtgggcgtaattatttggctaatagtagttttattaatctgctttagcgtgtttggcggtctttggctgcttcctatttacttgcttttttgccttgctttaggcttttactttggtgtaaaatatctaactatttaatgttatgaatgaaaaagaatttaacggcctcattttggccgaattggttaaaatagcaaacgacgtttttacaaatgaaatagaaatagctcccggcacctataccgccgcggagcttgcaaagctgaaagatgccaacggtaacgagataaatataaaatatctttgcgttgacgcccaactaaatataacggattttaggactgtacaaataaacagctttaaatgttcctttccagtggatcaggtttttaatcttgtttggcaatttgaaaagctgataggcaccaaacaagccaataaaacaaggtttaccaaaatagaagagcgcgaaaatattgtttgctcctttgatatatggattacaaaagagcatctaaatatcactaaattagtaacaaaagattctctaagaccagcatttaattatatttatcttgatccttacaaatcggctttagtcgcttctgatgggcgtacattaaaagaataccccgtaattattgaaacatccgggcttttgcctgacagcctgaaattatttatcaatcccaagcatttaaaagaaatggttggccggtgttctgtttgtgtttgtaatcaggaaggcggcaatattacagaaataaccaacgataagaaacaaacctttgtttgtgattttgccggatatttccctaattaccggcttgtgtaccccaatctttcaaaagacggatttataaagattcagaaaagcgaattaaaagcggttgccagttttgtaaaagaaatagccaaacgaaacaaaaaaagcggtttttcacttcgcactattgccggagagaataaagtttatttatccctcaaatccgcaactacgcgcctaatatgatacagaagcgaaaagaatctgcatcgttagtaaaaagggggcacagtgcatcgaatgtcaccataaagacatataaatgccccttaccccaccatgcgacttgaggcaatacgcaaaatcacgactataagttgtcggtgttatccaaagtcattctggaacacattggcataagcattgttgcatgaatagatattcagcacatacttccttgatgtcctgacccatttggctggcacagagatgaacttaaagacaaacgtcttgatgcggcttgttgctttgagtccgaacctcttcacgtcaagcctcgccatgatgaatttatagaagttgcgtatgagtgccataagcagaagaaacaccgtgttttctcccataaaggattttggaagcctgttccagccgaatccgttattcatatcatcgaagatgcgttccttccctccacggaggttatagaattcgacaatctctttctcggaagactcgtagtcatttgtaaggatgcagcggtaggtgtattctccttcccacaggtcgagttcgccgtctatccgcttctgtctttgaatcacaagacggtatgccttccctttccatttctcgatgagaatggaggccagctcaaactcaatgccgcccaattccactttcttccaacctctgagggcaaagatgtcattgtagagcgaactgcatcggttagcacggatatagaaggtcttgcagtgtttagcaatctcttccactatctcttcagaacacgagccgcaatcagctctgaaacggttgataataagcttgttttgttcaaacctttcaaagaacctcttcagcgtgtccttctggtggaaacggacatttgtgttgccgtcgctgttctcaatgccgacaatcaagttgccaataaccgccacgccagggcgataaccaaggaacttcttgtatgtaggcttcgcatcaaacttctcagcctctatgaactggtggtcgaagtcaacgtcatacccctcgccctctttcagctgccctgtggacaataggcaattgaggagcagtgtattcagcttgtctgccgtgttgaagtcgtaggtcttgccagtgtcggatgtgtaggaaatgttatcctgggtcagttcctttatggctctaagaatcgtgtcggcactgcatgtgcgaagtgtcggatgaagcgaaaggtggtacatcagatgagtggtgacatcctcgatgcatgagccgccacaaaaataaacgctcataagcgaacggatgatttcgctgtattgataaccatacagcctgcatctcataccgagggttgagtcgattacagatgagagtctggagtcaaattgctccattattgaaaataaattcaatctctcaaaaatagtttatataatgatttgaaaatcagattgttgaaaatttcacgattttaattaaggaacaaacaagaaacaaaatcgttaattaaaggtatttcccaattttttgttttcactctgtttctttctttgcacttgcttataatcgggacttcttgaacagcttcccaccagatttttttcgtccgatggttgcatgtgagcttccaagaaccactgcagccaaaagaaaaaagcaagtattctttagttcatacaaagataaggaaaaacttataggcaggcaaatttggctgcctaaatatagtttactttgatttagcatatatataggctaatggactaaactaaaccttttcccgaacttcgtaaaacactccggtcccattgtacagccaaaagaaaaaaacattccacgtcatatttttcttttcgctgcaaccccctttttataaaccatcaaccttttacacgagatcttctcttccctgtgttcgcacatccgctttcgggctgcctgatatgaattgtgtcgcaaaggtacttgtcatgtctttcttgtatgcaaggtcaaagcctaacggttcacgacaaaatctccaccctccgttccgcacgggtagtatttaatcgtgaaaccttgcataaagagccatgacaccttttgaagcgacataattaaatcaagcccgaaagtagctggatgctacaagagggaaaaaagaaaacttaaaattcaaagttatggcaaactacgcaacaaacattttccacgcaagtacggaaaacaaacaagacctcaataagatagaggcatttctggacgataatttcaacggctttgtcaaccggtatggcgacacggtagatgccgaatttgattcccgctgggaatacccggaaaaagcaatcaacgaattaatagccttattggcagccaaagacaaaatctatatccgcatactgacatacgagttagaggacgaatacgtgagctttcggatattctcgcaaggtaaatggaacattaagttatcctaaacctaaacacaattcactatgtacgaatacgaagaagatagcgatattatcggtttgtcctgcacgttgctcaatccatataaaggttacatggaaggcacaatcgtgggcgactatggcaataccatagttgtccgccttgaaagcggcaaggaaatttcagaataccgtgatgaagtgattatccatgattaaacgatagcaaacgtatgacacagatagcaacaaaattcgtcaaatgggacattcccgaactggcgacattgcaggacagcaaggtttacaaattgcgggtacacctgaacaacggaggcaagttaaaccgggaagaaaagaactggattacccgtaacgtatgggaaagtatctatttcaaacgtggaattgccttgagcggttatcactttgacttttccgacatcctcaaacggtatttcgtcaaacagcacggaagtattcacgagtattatgcgattgacaaaacagcgttacgctcgatactgtacggcagaatagaggatattgtagaagtaagcggttaaaacaacaaggatatgggagaatacaaattttatcaagaccgtaaggttacaagttgggaacgggattatttcagtgtgaaagcggacagttatgaagaagccgaggcaatcgtccgctcatggaactgtgaggacgtgtcgaacatcattgacaaccgtctttgctatgaagagtggcaagcattgaccgatacatcggaatctatgctccccgaagaaaacgacggcaacccgacaatagaaattttcaatcaagacggagaatcaataatgactaatgtacccgaaacacctcaatcaaaccaatagaaccatgaacgtaacaatcgaacacgtcttttgccgctatagcgatgaagcggaagaaatctatttccgaatcatgaacacgattctttttgcaactgacgaaaccgaacttcgggcaagtatggaacgcttgaagaacgaaaccacgctcgacgactatttcatattcggatacggagcacaccatatctggataaagcaacggcgaccgagcgataaaaacaggattttcaaacatcggattatggtagcccatttctgacaggaacaggcaaaagacctccaatgcgctttgcgggctgaaccggaactaccagcttcagcccgttcctctttctcgcaatagacatgctggcacaatcccccttttatcctcacgatcaatttttatactgccccggaatacccgtttatatttctcttttcgctgcaaaccctttttatcgcccatcaaccttttacacgagaccttctcttccctgtgttcgcacatcgctttcgggctgcctgatataaattgtgtcgcaaaggtacttgtcatgccgttcttgtatgcaaggtcaaagcctgacggttcacgacaaaatctccaccctccgcttcgcacgggtagtatttaatcgtgaaaccttgcataaagagctatgacacctttcgaggcgacataattaaatcaggcccgaaagtagcaggtgctacaagagggaaaaagaaaactcaaaattttataggttatgacaaacgatgtaacaaattcaaatggaagagtaacggtagacgaagtaatacacagggattcggttttcagataccaactgttagaccgcttacggtcagactgcgagtattacctcaattacggtaacagacaccccaaaaccttatgggctggcgacgaaaaattgcaaattgagtttatgataaaactgcatgatagcttcaaggagggagaaaaaccggagtggcttacgatggataaaattttggaatacagtaagagaatgatagctcaagaagaataaaattactactaaggaacagactaaaaatgtgatattatggcatggttggcagtaaataaagacggaacagaatggattatgcccgaaaagcccgttcggggccggtgtgggcattgggagtatttggaagaagtgtacaatgtaccaatcgagatagaactccccaaagggactgtttacaaacttctcggcaaagaactgacatgggatgacgagccggtagaattacagaccaaaacagaaaaaaggtaaatgtagtacgggctggagtaccagtttcagcccggttacaccggctaaaatctaaaacagatacgcgggtgcgataccctcttttatttccgaacagacactcataccgtttccttcggaaatacccctttatacatttcggctgcgccatatccttttatatcgaacggccactcatgcaaaggcggcttctccgctttgtttcaaggcagacttcggccatttttcctttacctcttctttccctcatttctcttgccggatagagacagcgatatcgatacgtcgcacacgccttttgccggatcttcgtccgatagtattttccacgatgcagcgtatatggttgttaaacggtatatcgttcttgccgcttcaaccccaaacagccgatacactttctcgcctgatgttcttcccgcccacctgccggaacgggagcggtcttgtgtcggtggacggacaggtctttcatgtttccgagtccgctgcggattgtttcgcctcgactttttcgcgaccgctttctatttgaagtcgccatatcgtttttcgttgcaaagttagtatgcagacgggcgcgacccgatggtcttgaccaatggcgtatcgcacaaatcttcctttatcgggcctgcggtttggggcttcgcctccaaaataaagagtatttatgcgctatccttggtgcagccctttactgcacctacttttatgcaccgtaaaactgatttattaacttcaaaaagcaatcgcaatgaaaaagatcgagaacaatttcgcagtaaccggattcgtggcaaaagatgccgaagtccgtcagttcaccaccacaagtgtcgcacgtttcccgctggcagtggcccgtcaggagaagaacggcgaagataccaagcgtatatccgctttcatgaacattgaagcgtggcgcaagaacgagaataccgggtcgttcgaccagctcaccaagggcacgctgcttaccgtggagggctattttaaacccgaagaatggaccgacaaagacggcgtgctgcacaaccgcatcgtgacggttgcagtcaaattttatccggctgtcgataaagaggaggaagttcctgcggaaccggcaaagaaaccgaagaagggcaagaagtaattcctgcctttttgagacaaagcggcccgaaggccgcttttgttttgctcgttaccgttccggaacgtctatacttttatactccttcatactccacacgaagagtccgccgtcgtccattgattttcccgtgcaaagttaaggcggtcgggaaccggcaaggcgcggcttcatttgaggttaacaaccatcaactcgcaagctcgtcaatacttgttcaacacaaatgaaatcgtccataggactatccgcttcctccttgccttgtttcccttctgtccgccttgtggtccgcacgtaaaatcaaatcccgccggacgagggaaaccctccgaaggcagggataaaaaaacaaaagtcaaacttaaaattcaagacgtatgaaacagatgatttggtcaagctatgacctgttggacgaaacggcaaaagaatactatcaaaattcacaacgggaaatattggacgatgactgttacgaggtcagcgatgaagaatgggcagaagaagtatatcgctggctggacgacgaacggagcaatctgaataaagaagtggacggcattattgtcgtgttcggcaacttgggattatggaacggccggagacaaggctatcaaatattgggcagcaccattgccgatattttgaaatcccagtgcgacgatgcagaatggtacggcgacggctataacattcgcggacggatgggccatcatgacggtacgaactacaccttgtatcgtatcgccaaagaccgtgatgaagcggagcgtatcgccgataagatttacaaccgtgaaatcgacgaagaaggtttccgccggagaacacgttccctctatccgtatgtagccgccgtgtacggctggaaaacaaggcagcgcaagccggacaaggccgcataaaatgctgtccacaaaataccgcaacgcatccgccagagatggttgcggtatcctttatcgaatgggcgaaacacagaaccgtctccttttataatcagctccattcctttttatcactactcacggagcaatatccgccttttataccgaccccggtctttcgtatatctcccgtcttttcttctttccatcaccggtttggttttaccagatgcaaaggtaggccgtcgcacttgatccggtggcttgaagtgcatttcttgcaaaattcttccttaccggggtaagagtaattttccaaggaaagccaccgtatgaagttttcccgacagccgtgtaccgcatccgtaaaaccccaaagcggttcaggaagaaagaaccgacaaaagggaaaataagtattaacaatttcaaaaaactaagattatgcctaatcatgtgacaaaccgtttagaaataaacgcagaccgggaaacagtacaaaaagtaatgaatttcttaaaaggtaaaaccgatgatgacaatacgccttgttacatcgacttcaacaacatcattcctatgcctgaagaactgttgatagaaaaaagcagcagtggagatttgggtatgaaataccttgaagcaatgcagttgaagccattctattttttattggacgatgatgctttgagaaccattcaatggatagaaggattggcggaaaaggacagaaaagaagcgctgcaacttggagcatcgtatttggaaaatcggaaaaagtacggttatcccacttggtacgagtggtctaccgccacatggggtacaaaatggaatgcctatcaccaagactttgaagagccgaacatactttggttcgatacggcatggaatggagtgccactgcttatccaaaaactttccgagatatttccggatgtggaattccattacgcctatgcggacgaagacttaggtttcaatacgggaagaggaacagcccgcaatggagaaatcaacatgacgatacccgaaggtagaagcaacgaagcctttgaaatcatgttttttgtgaaaccgggaatggacgaatattttgaactgacggacgaaggttacaaatgggtttcctaaacattcggtacagataatgaccggtgcaggttcgggatacattgacaatggatgtgtcctgaatccttttgccggaattccccctttatatcttcatggctctttcccttttatcgaaacgcggtccgttcccctttgtaccgtgactatccagccggaaagtaatccttttataacattttagcttcccccgttttatcctccttacagccgtttcccaacactccatgccgaaagcccgcttattttttctgcaaagttcgattgccgcttgtctgtcctgtcaagaaccgcttacgcttgctgtcgaaaaatcttcctccccgactttgttggagagtgtatttttcgcagccttcttgcctggaccgaccgtcaatcctataggcagaaaaataatcaacctttcggtacaggattgtaccaaagggaaaaacaaaaaatagttcaaacttaaaatttagagcgtatgacatttaaagaatttatgcaagagaacggttatgagttacaaacaaccttttgggaagacttctcaatagcggacagatttgggttggcggctgttttggacactttcaaccgggctttcagggagtggaaaggggactataagttcttgacggaactgacattggtacttaaccataagatatggcaatactatgaaaacagaccggatatggcggtactttacaatactctttgggaacaagccgaccaatacgccaaagagaatctgaaagggaacgagttaagctattactgggaggtgacggattaaatatataataccctcgcatgatataaagaaaaagaggcagttctaaaagcctcttttctttataggttaacttctaattcttttccaccagataaacaaaaatacgcattctggagctggtgtaagtattctatgcggtgtccgcttaccgtatattcattagcatgagtggtaatgtaatatacagtttgatcatcccagtcttgtgtaatctccatttcatcattgtcaaatgtataatcgtcaagctgattaaaaccgcattgcaaaaccaatttttcagtaagtaatattggctgaatgtctccatttgttttatacggaggttctccccatttataaacaacggatatattctcttttctcaacttaggatcataatccaatgcacaaaccaaagatggtttacctttataagcaacgtaattgccaactctcaattctttaatcataacaattctgtattatcttttagactaaaaacttaatccctcttaaatcgctaatagatacaaatctacaaaataaaatgaaacttttacacgtcctttattttccctcttttacggcactcaggaatacttttgccggtttgaaggcggggatggaatgagctggaatcacaatagttgtgttctttgatatgttacgggccaccttctctgccctttgcttgataatgaagctaccgaaaccccgcaggaacacttcgttcccggcaatcatcgcatcttttacattctccatgaatgcctcgaccacggtcattacgacctctttctctattccggtctgctgtgcaatccggctaacaatttctgcttttgtcatatataagaattaaatagcaatgtacaaaaatgcaactttttttggataagtcaaatctttggcccacctttgcggcgaaataacgcaaaggacattttataatcctcatcggagggctatggaagccggataagatgactgggtaaaaccatcgtcttatccggcttccgtcgttttctgccggaagtaaaccatataatataaaatacaaagacgtatgaaagaaaaagtgattgattttgggaatgagagagtttccgttctgtttaagaaactgtttttccccactctgttgggaatgttgagtatgtcggcggtaacgactatcgacgggattttcgtgggacacggcgtgggcagcgacgggattgcagctgtaaatatctgcgtccctctactgatgtcactcatgggtgttggactgatgatgggggcaggttgttccgtaatcgcttccatttacttgtcgaaaggaaaaaccgttttggcacgtgcgaccatcacccaagccatgcttttcgtgacgctcatatccgtaaccgtcggaggattcattctggcgtttcccgaagaaaccgcccgtatgcttggctcgtcggagcatttgctgccgctggttgtcgattatctggtctggttttccccgtctctgctgttcgagttgtggattgccgtcgccttgtttgccatgcgcctggacggcgctccgaaactcgccatgtggtgcagcatcatagccgcagcggtgaatgtcgttctcgactggctgttcatcttcccgctgggctggggagtgatgggggcggcatttgctacctccctgagttgtttggccggggcaacggtgacgatgggttacttgttgttctatgcccgtgacactcgtttgcattctctccgtccgggtagaaaaaggattttattcttcttccatgatataggaatgcagtgcaagataggctcatccgccttgttaggcgaattgacaatggcgatattgctgttcatcggcaaccaggtattcatgcgccatttgggagatgacggagtaggtgctttcggagtaagctgttattatctcccgttcgtcttcatgataggtaacgccattgcccaatctgcccagcctattatcagttacaatttcggcacaggaagcacggaaagagttcgttccgccttacgcgtttccgtgtttgcggcattagtttgcggagtcatttctactgccgcctttatcctgtttcctgaattgcttgtcggactattcttgcgcattgacaatactgccgcacgcatagcgatagaaggattcccttattatggcacgggattcatcttctttattttgaatctctccattattggatattatcagagcatggaacggataaagccggccataacatttgcagtcttacgtggatttgtttttctggttccgtgcttcatggtattacctgccataatgggagtaaaaggaatttggctcgccttaccgttgtctgaaattctgacgactttagtgattgtcgttacattttggatatattcccggcaacgtgccataatttgcaggcaattttttcggatttaggttccatgtaaaatgccgctgttaaaaaagtttaaagattggtagcggcattctgagcagttatctggaataaaaattccgccaaatgcatgatgtattaataaacattaatggaacataaacgataattcgttatcaaaactgtacatttgtataacatattatatacatataacaataaatatattataatttatggataaatacatcattggcgagaacgctggtaaagtttggcgtttattgaatagtgaccatctccgtaaatgggaattttcagagataaagaaaattacagggatggatgatgccgagttgggtagtgctattggctggttggcccgtgaagataaggtacaattcgaacttgaacatcataacagtaaggacgaaaaggcatacttgtatcttatgttgaatgtatatatttgactccttcctataatgctgaaaaaagaaagaaaccatgctgatgaaaaacatgatttctttcttttcgtttggtatagaacacaatgacgggacacttccatcaatgagagaccgagttggagaagacattgatgacgaccactccggcaataatcaggaccagcccgatgatggcagccaggtcgaggtgctgtttgaaaacgaaaaagccgataagcgcgataagaatgatacccactcccgaccaaatggcgtaagctatgcctaccggaatgctcttcagtacgacactcaagcaatagaaagccgccgcgtaccccagaacggtcaatacggacggaacgagtttggtaaactgttcgctctgtttcaagaaagaagtggctacagtttcaaaaacgatagccaaaaacaagataaggtaagttttcatttatctacattcatcttttgatttatacgaatcatattccgactcctggcacgaaagaaccggcgagacaatgccgtcgttgtctcatacgtgttactggtcgcgccggtagtcgctcttgctaaaaccgccgaacaccgctttcagaagtttacccactacccagaacacaacgattatcaatattacttccatactacgtttttatttaatctgtattaataaattaaacatctgctgtttgttaccaagagtgcgaatccgtttcaacctcgttttccgacagttaaaccgtttataagcggtagttgccgccacccttttcgttttacgggttattcttccgccggactgtcgtcctttttctttttccgggttcccaaggggccgctgaatttccccctgttgagttttaccccatgcctgtggagcacgctgaacaccgaacttcggctgctgtacccgcttaccgccatgatgtcctcaaacgaatggccgttgacatacatgtcaacgatagtattttccttgtcggccttgtccatagccttcatcgttttcttcggaatcttcgctttctgttgcaggttcaagacacgtgcggacgaatatcgcagtatcgccacctcttcgggaagcgccccgaacatctccagcacatcggcaaccgtcgtttcgggaaacagtttaccccgtgagtcgatccggtcatggatggatatgatgcgtaccaccttgatacggcacaactcaatgaaggccgacagttcgcgcgaccctcggagggcattgctgaatttggccaccactacctcgtcgcccctttcgaggcccgccacaagctgtttccatttaggccgtagcgcctcgctttcgaccggttcctctatcacttgtacacagccgtactcctgcatccattctttgtcagcctcgaacccgtcgtaacgatccgccttaaatatgtaacctacttttgccatctaattgtacacttctatgataacaagtacaaatataacagttttattttaaactaaaccatactttgagtggaaaatcgaagaaagcacttggattttcccgttttcttcacttgttttcattgaaaatcaaactattaagtacaatgttaaaaatagcttataaaacaaatttcaacacttgccatcttgaaaataatacttagatttgcgctgtaaaattcaaaattgaacaatgaataatagaaaatcatacttaaaaatcatactttccattgctggactttctgccgcttcaattgccgttttcacattcccgtcatgcgacggtccgaacggcaaatcactggcggaaccccaagacacgcctgccggtctgtacagagagtacctctccgagatacgcaagtcccaagaactttcctttgaagagctgaccgtatgtatcggggaatggcaaaccttgaaagattccgtggctgcagccattcggcgggacacggcccgtcagacccattccggcacacgggaagaatgtcgtctgttacacgattccatttgctcggaactttcccggttgaccctgtcgaaaccgcgcacctacaaggaagtgttgagcctgaaagagcggttctctccctatgccggagacgtggaactgcaccgttccgccgaggagatccgtccgtttttcgcagcactggataaacggcctgcctaccgtggcaacaaggagcaaacgctgtcggcatatcgtaagttgcttgccggaaccctgaacgacggcatacacgacagtcgtgacctcaagagattcatcgagaaagaagacgccgtttttcgcgcttttctgtccggtctgcacgattccggcagtgcaaacatggccgacattacctgcgacacggagaagtgctgttccgaggtgtttctcgccgccggacgcaaagagattacctacaaggaggccctgatatacatggccctgcgtgccgaccgccgactgatacagaacgtgcgtacctgtctcgacgacatacatcggggcgaagtcgcaacacccgaacaggcacacgcctacatttggatgatactccagccctacgcttccttggacggcctctgtatgacgcttctctctccggaggataagaaagccctcgaccggattgcgaccgagacacccggcgctttcgagacactgcgtaaaatcctgccgtcggaaagaaaccggttggacgagctgcccggtatgctcatggagatattcatcgcctctttgtaaaagcctgttcacaaaataaacgatatatgattatgttacgacactttttggatgactttatgtcgttcgtacccctgcaaatgccgcagcttctcaatgtggcgacaatggaggaaccgcagttttacggcgactacgttctgctcacgttcccgttgcgggacccctatgatttggaggaggtcatggacatattcgaggacgacatggagctgatcacgctctaccaccatgtgccggtcggattggaaaaatccggtcatagcacctgtgcctactccaatcccgctttcggacaaatgttcaagatgaacgcccggacagacgcagacggtaaggtaaaccgcgtcatcgcgaccgtttacgattcgttggaactgatgtacggcgacctgtctctcgacttgaaactccacaccggaaacggcagcttcaagtacaagaaggagctggaagacgtgctgttggatttcatgtaaaacagttcctatgcgaaacacgatatatcgccagatgattttctgcatcgacacataccgcacatggatagaggtggccgatgacaacctctacaaggagcacgtcattccgaggaacaaccggaccgatttcctggtttcccgcacgctggtactgcgtgcttgcaaaccgcatggcacatacgaccggggcatgacgtggacgattccggagcatgatctggacgcggcactggctacataccgcaagcagaacggcatattcaagtcccggatgaagaaaggcgcatcgtccctgacagctgaagacaccgagaacattatccgcttggccacccacgggattgtccgcttggaactcgtggtacggcccgttcacataccttcaaaaccctattacctgttatgacttggattatattacagtttgtgtttcttgcaatgcctgtcgtccttccggcactgttgtacaggagcagacgttacttcatggcaaaattctacgataaaatgatatggagcgaaaaggcccgcaggttgtacacccatgtgctgcttatcgtattgctcctcttccattatgtctatacgagcggacaccccggcgagttcggtgttgtgccatccaccattgtgtgtgccgcatgggcctctttccggcgggcggaccgatggatgcgctgtttgctcgaccggccgaaacgtttcgtctggtttgcgctcttggcattggtcatcggcttcgtgccgcatctgtacacgatgtccgtaaccatcgcctttattcttttggctgccctgttctacccgtcggcaagggtcatgtccgaaaggacagacatgcgcaaattcctcgaatggctggaatatcccggagcattagccgacagttatcatagtatcatcacgcaagactgccatgataatgcggataatggcagtccatacaatccgcacgatatgaatcatcaaaaacagaacgaaaatgagaaatagaaatgaagcacccgccaccatactggccaacacggaagtgttcgactatctgaaagaaaaagtcggcgagcggaaaacaagaacagaagcctactgcgacctgttggataaatcgctggcaggtttcgtctccccgtttttaaggaaacaagactacgacctcggtccctgccagtgccatgtgaccgtttccgaccttgcatccgagtggcattggcaccgcgccaccgtccgctcgtttctggacacgctcgaagcattcgggcagttggaacgtatccggctggcgaaaagcgtcatcattaccatgcacctgcgaatcggcacgcctgacatgccggacagtgggcagaaagaaacggactttgccacaagaatacaaggaatattgtacgattgggtgattggcaaagcaacttctttcgatgtcggcaaatcatgcggacaaatcatgcgtcagaccttggcggagataaccggacaggacagccgggcctatccggacaaccattccggcacgacatccgtgcataccctccgatcagaagaacaattgcgtgagaccgttttggagtgtatcgcccatgccgccctatggcgggttctgcgcaagtcgagattcgacgacggctcaccgctcgtgcagttcttccggtccgatctcggtggggaatgggcggcgttcatcgaagcctcgaaagagcttgcagagcttgttatcgacggaaagccggatggaacggatttcggtatggacgaagagacggaacgcctcgaatcgcttcgtaaaccctttctatcgcttttagcgaaggcgcaggaagaaagttgaacagggattcgcagacaaagattgtataaccacgggtaatttgccccggttccggtccaaatatccttccagttatagcaggcatccgggcttgcccgtctgccactgaacaaagggaagggggagcctaataccccgaccgacattcgtcggtgggaagggtgtccgtacaagcagcaagctgggacacgggggattgtccgaaataacacggaagcagtatggcaaatgcaaaacaggttcttgacgttcaagtgtcgaaaggaatcaccgccgcccaaggcaacgaacatctgcgcaatcgcagcaaagaggcagagaagtacgccatgagtaagggcaactacgatcccactcgcaaacatctgaacttcgagattgcgtccggaggcaagatacgccctattgacacgagccgtaatatcccggaacggatggcggacatattgggccgtcgcggaataaaggaccccaacgagggactgatcgaaccgaaataccgcacggtggtaaacatcatctttggaggttcgcgggagcggatgcacgaactcgcattcggtacgcagaaggtggattttgaaaaaggtgcggacaataccagcatcaaaaggaagagcgacatcgaacgttgggcaaaggatgtctattcattcgtttgtggcagatacggagagcagaatgttgccgccttcattgtacacctcgacgagttgaatccgcacgtgcattgcacgcttctgccaatcaaagacgggaagtttgcgtacaaggagatattcgccggaaaggacaagttcgaatatagtgcgagaatgaaacagctccatacggactttttcgccgaggtcaacacgaaatggggaatggcgagaggccggagcgtcgccgagaccggcgcacggcacaggacgacggaagaataccgccgtatgctctcggaagagtgtacaactatcgaggagaatattgaccgccaccaaaaagtgctttccgatcttcattcggatatacggctggcagagcgcagggtaaagggtctcacttcaatggtggaaaacctgcgacgagagaaatccgaaaaggaggcccaactggcagcactcgaaaatgacatgaactcccgaaaagacgatgccttggccatatccgccgagaaagagaaactcgaaaaagaactggtcgctatccaagggaaactggcagacaaacaggagaagttacagactgccgaccgacagctttccgacctcaaagagaatatggatgccattcaggaacgcacggaacagcttaaggaagaagcctacgaatacacccgtgatgtacattccaaagtggacagcctgctcaaggatgccatgctggaaaacatggtcgatgagtggcgggaactgtcggcacgtatgaagccctccgaacggcaactgttcgatggcaccctcgtgcgctccgtggcagaacaaggcacggaagtcatgcactgcgccacactgttgttcctcggcatggtcgatgatgccactacatttgccgaaacacgtggcggaggtggtggcggcagtgacctcaaatggggacgcgatgacgacgaggacaaccgggcatgggcgctccgctgcatgagaatggcgagccgcatgatgcgtccggccatcggcaaaaagcccaaacgataaatggcaaagattgcctgaaaactgaatagattacaattaaaaaattggaattatgacaaagaatatcatctttatctttgcggcgttctgtacgctgcaagcccgtgcggatgtacaacccacggagaaggatactgtacgctgcatgttccgttacgatgacactgaactgctgcagccgttacagccctcatatcttgacggagtggtcgtcccggcacggggaaacggcaactggttcgtcagtatcgccggaggcacgacggcctttctcggcaccccgcttggctgcgaagacctgttcgggaggttgaaaccctcgtatagccttgccattggcaagtggttcaccccgtgggtaggcgcacgcataaattatagcggcttgcagttcaaggacggtacgctggccgtgcaggaataccaccacctccatgcggatctgctatggaatgtgctcggcggcagttattcccgtcaggaacaggtacgctggcatctggctccctttgccggtatcgggctgctgcatcatgcgaccaacgggcataacccgtttgcagtctcttatggtatacaggggcagtaccggatttccaaaagggtaagcgccctcgtggaactctccggcgcaaccactttccaagatttcgacgggtatggtaaggagaaccgttttggtgaccacatgttatcgcttaccgccggattttcttttcatatcggcagggtcggttggaaacgcgccatagacccaagtccttatatccgccgcgatcagtggcttgtcgagcgcgtaaatgctttgtcggaagagaaccgtctttatgcagggcagcatgacagagaccgacgggcactcgctgagctgaaaaagattctggaaatcgaaggattgctcgacaagtacagccatctttttgatgacgacgatgcattcgacggcaaccgttatcccaaaaacaattacagcggtctgaactcgcttcaagcgagacttaagaaccggaagtgggacgggaaatctcccttggatgggaagggtacacaatctgccgacacaattcccctttgtgcgggtcaagacacactctgtatgcaatatttggctcgtatgcagaacggaaaagagtgtatcggctcacccgtgtatttcttcttccaactcaatacggcgcgtctcacggatacctcccagacgcttaatctcgacgagttggcaagagtagcgaagaagtacgggttatcggtaagcgtcattggtgcagctgacagtatgaccggaacagcatccgtaaacaatgtcttgagtgcatcaagagccgattatatcgctgaagaattaatcaaacgtggggtgtcgggcgacaagataaccaaaactcaccaaggcggcatttccgattatgcgcccaatgaggccaaccgccatacaaaggttgtgctgcatctcaaataatactttttgttcatacgatataaaaacattttttttcgtttatggagagcctgtctgtgaagatcggctctctttttaaacggaaatctgactgtttgatattttctaatcggtaacgaacatcgtaattatttattatatactatctttgcattcagtcttttaccggtataattcatgaacatgcaaaactcttatttgacctcgaagccgcactacgagattctggacggactgcgcggcgtggcggctgctatggtagtggcctttcatctgctggaagcgcactccggcggcaaccatctgaaccagattatcaatcatggctatctggcagtagatttcttcttcatgctttcgggcttcgtcatcggctacgcatacgatgaccgttggaaccggatgagcacgggaaccttcttcaagcgtcgtcttatccggctacagcctatggtggtcatggggagtatcgtgggagccgcgctcttttggtttcaggatgccccctgttatccggcaatggagggcgtgtccgccggtgcggtgctgctggtcatgctgctgggttgtacgttgctgcctctgccgctgaagtgggacgtccggggatggatggaaatgcacccgctgaacgggccggcatggtcgctttactacgaatacatcggcaacatattgtacgccttgttcatccgcaagttcagcaagacggcattgactgtcctcgtggcgatagcggcgtgcttcacggtacaccgctgccttaccgcacctgccggcgacatcgtgggcggatgggctttgaactgggaacagcagtacgtgggactggtccggctgatgtaccccttcttcggcggactgctcctgtcccggcttggctggctgatacgcacccgcaagaatgcttttgggtggtgcagcctgatgataatcgccgtgctttccgcgccccgtatcggtggggaggacgggtattggatgaacgggctttacgaggctttctgcatcatctgcattttcccggttatcgtctcgatgggagcgggaggcaggataacgggcaaacgctccgctgccgtatgcaagtttctgggcgacatatcctatcccgtctatatcacccactatccgctggtctatatttatacggcatgggcgttcaaccgtcaggcgacacttgccgaaggccttccttacatgctgctcacgttcgtcggggcgttcgcgcttgcctatgcctgcctgaagtgctatgatctcccggtgcgcaaatggctcacggaacgtttcttgaagaagaaataaaaagcggtaaagaaatcctatatttattatcgtatttctgtcggatgacagataaagttccgacgccgaaggtgttttgcggacgacacaatcagataacgcgaacccaaatgtctattactgtttcgctgatagaagaaaagccccttgatgcctttgccataggtttgaggggcttttggggaggctacaaacctctttttgttgaataggttcttttgatattgtcacacctttttctatcccgaccgacgtataaaacgtgcgtgtgcatgtcggttgtacaggccaaagacataccgggagaataaaaacagcactgcccgcctgtagaggggtttcctacagacgggcagtgagtaagacacggaattaaagtttggcggttgtcactggatagttacgccactgggcggtacgtaggctgcacggatgcggagaggtctattgatgcggggtgctttaccggtagtgccgttatcattcgtgtatatatcgtcccaatcactttctgcataaccaccgtctggcagggccttggtggcacgggcatagctggtgctctctggatagatatacgcaggccatattcctgttctatcttttgctgccgccgatgaccagtagaaattgttctggaactccgtgtatgtattgtaataagaggtaagaatactttccagttgggagataccgggcaggaaccaaccggaagaattgctcatgccctgtacggctccattggcattgcgcttgttcttgttatagcaatattccgccgctgagcggggtttttcgttcaggttcatttctgattgtccagcttgggtaataatgcgccgggtagctgccgccccatgtttgtttccttccgtccattcgttatttagcggacctccgatgtattcaccattacaaccccattccaaaccgtcatagatataatccccttcaaactcgttcagggggtcgtaatgggatatatattcctcataggcttccacgtagatagtgccttgaagtctgccttcataataccactgtaccggcaacagaccgtgctgtacgatttcaatggtacgggtacgtggcgtctgcgtgttgttgtcggtgtacgagatgttgacggtggcggtgcggtctttcgtgcttaggttttcgtccaagtagaaatagatgcggtcacggctcctgctgatggtgtattcggtgttttgggcaagggtgttggtcaccaagtccgtggtgaagtatttgcgtttgccgtttcccgcagtccatttctgtccggtcgccaaatgggtatctgtactcatgtcggcagagagtgttccattctccatattttcggctggcacacgttccatgcgtatccaagtgtgactttccgggtcggctatgctgactttcatctttggattctcatcttcctcgaagaggtacacgtccaaaggtgtgatacagaagtgggcgtcgtggtcacgctcgcgcagcatggacaggtagaacgggttgttctgctcggtgatgttgacgcgggcatcgaaggtgatgtggtccgggttgttgcccacatgggtcagtccgctgatgacgatgttgttggcgtagtgcctgttgcgtatcaccttgaagtcattcaccgggttgcctccgagatagaaggtatattcggcctcgatggtggtgttatcctgatttgcgggcagggaggggtcgccgttataggtagtgtagtaggctctcatcttgaaataggtagccttgctgttttcgcctacaagtctcggcttccaccgctgcttgtcaacatcgtcctctactccagccggatactgatagttttccggatcttcgtccggttcaatcatgttctcgaacatgtagaaggtcagggaggcggccccgccgtggttgtaaacgacggcatcgctctgtatgttttctacattgcggtatggctcatcggtagtcaggctggtctggccatcggcaggctcggtcaggggtacggcggtaggcatgttgtacacgccccattccgcaatggaaaggcggggcagttgtccgctctcgtccgagtggtcggaatcgatactgatgttgatgtcgatgcgggccatcagtgccttgagctgcatcgtgaggcttcccttctcggtgaggttcacggtcgcgctcttgcccgccatcggcattcccgtgctgggcagggtcgtgatgtcatcgcgggtgttaggagtataattggcaggatcgtacacgaacgcttcgagcagctccttgggctttttcccgtctttgctatattgggggaaattatcgggataaccgtcgccgttggcatcagttaccacctccggagtcacgttggccaaagcgtagatggtagttttttttgcgaatgccggatctttaaacacgtccgtaggaatgctgacattggtcgtattcgccgacggagccatatacggcgagaatactttcgtgttgctcgattccagatagtcgccgttttcgtcgaagaagaacaggtagagctggttgatgcgcttctccttgtcgtccttggcgatggccgagcgggtgacgacttgctgcggcagcatgttctggcagacggcctcgatggtgaatccgtcgccgggcggaacggtaccgccgccaaagtcctcctccgtggtgcaggctgccggcaagagcatggaggccaccggcaggaaataataaagtatctttttcatctttatgctgttttcggttgttgttttattggatagagacgtcgctgtcgcccccgtcttcccagaactcgttatcggcggcaataaagttcagcgcgaaggtttcgcccacgaagttgagctgcgccgtatagcggacacccgcacggggctggaactgtgtcggacgttcggctgtagcggtcttatccgcccctttgtaggtatattcgacggaaacctccacgtccttgccgaaataagtgccgtccgtggcgttgctcaacagaagcaggtgcttgtcgcctatcgggctgacggaactgttgggagctactgcaagccctgtctcgttgttatatatctcgtatgtgccgggataggtgccgctgtaggtgtagaatccctcttcgttggtattcttgctgaaatcgatggtaatcgagcgggtgaagtggcccgacaaggtaacacgcttgacggtaacagtttccttcttttcatctccgtaattgtagttgttcacggcgaagcccaagcccgtcatgatgtggctgaaattgaagcccacgttccccgtggtacgcaggtggttatagacgacggaaaccatcgcgtcgggtgtctgcatgtcgttcaacgtggtagtcgctacatcgcccgtctcgccgaacggcatggtgaacgtcagtttcggcacgccccgtgtggtggcgctggcgggactttccactgtaaaaccgtccttcgggtaataggcgaaaaaggtgtaccgatagctgtcgggggaggtcgccgccggattttccgtcgtgttgtaccattttcgcgggccgccactgttattatagtcataagtgcaggccgagccgttgtaggtgacggcttgattgaagaacacgtcggggaaggcgttgccgctcttgttaccccagttcgcgctgcccgatgcccagtccttttcggtgttactgccacgctgataaggcacgcagtagcccagtacgccgaacgtgccgccggtggggaatgcgtcgtggaacgtgctccgggtgagtttctccacggtaatggccggggcggcaaagtggatggcgtcgggactgtcggcttcgggctgcgcccattcctcctgctggcaggcggagcagagaagcaggagagccggaagtatgtatcgttgcttcatttggatgttcattttatcgtcaagttacagatagcttataattgggttattgggtcacgtcgatggttacgttcccgcctatggcgtcgctccatgcgttgaccgtgggcgagtcgaacacgatatagcctccgccggtgagggtgaacgagtaacggtaatggttcgccgcctcccacatgctcacggtggtggcaggcaaggtgtaggaagcggtctttcccctctcggcatcggtatcgtaggtgacagtcagtttcaccccgtccgtgagcgattgcggaatgagtagcaggtcgcccgacacgtccgcatttccggctggggttacggaagtctctttctccacgctgacggttccctctgccgtgttgctccacaggggttccttgccgctgtcgtaatctcccttgacatccagcccctcaagggagatggaatgtaccgtggcgttgccaccctcactgcgtgccgcaaaggtgatgcgtgccagcaaatgttggaatttgagggctaccggaccgggaggctctgtctggcctgccatgacggagatacccgtctttttcgccgtcatcaggtcgtgtcctttcgtggcgtcgaagcccttgacggtaaatgtgccgtccgtgcaggtggcggaggacacggcatcgcccagcgtttccacagacggataaagggcgtagaagtcgtaggtattaccggggagccagtatctcgtgccctcgtaaccccacatgccggaaacgtatgtcactttttcggcgttaaacacgctcgtggccgtaccgcccgttccgtcggtgtagttcccccatacgctgaacgagtttccatcggtcaacattccgtccgcgtcgtcgatggcggcccgtgtcacggcgggaccggcaaaacggatcgccccgctgttgccgcttgtttccatgtccgggcccgtgctttccgtacaggctcccagcaggcaggcgacagccggtatgaacaaggttttgaataggttgttattcataatcatacattgtttctttatatccggttatttctgacgctaccggtagcgtaaataaggagcaacactcccgttagtggctatgaggggacattcaacccctcatagcctgatgtgatgtcttttcggctattgatgcaagcgattactctccggcgttttccggggttacatcactatttgatgcgtcagcccattcatctacatcaataactttgaactcaattacctgctccttcaactccggatcaatcgtgctaccgttgatttctactgtatagttatatttgaaaccttcagtccattggttctgtactgtgccgctaacatcgcctttatatgccaattttcctttgaactgattttcacttaattgtttatttgctgcatcatagaaagttgcggtaaaggttacttccagattttcgttgctttgtggaatgacaaagcaggtcgtagtgtgggtagcgtccttaaagtcttcggcaatatcccctaatgttccgaaatcatagtcctctgttgaaacactttgagtagtccaattgatatctggtttcccgctttcggcataagtcgctgtaacattagttgtttttactgcattcaccttgatgtcggagattttcatggtgtagtcataagcgtccgtgttcttgaacgtgaacttcacctgcgacaacatatggtagaaagataagtttactggaccattattagcttcttttgcagtcacctcttggggtatagccacaatcaaatctttcgtattgtctaccgagtaatttgggaatgtcaacactcgagaggttgcattaaactctgcattctcaattttattaccaccattggagtaagcgccaaaacggtacttcttgccatttatccaataagcagtctgtgtgggattccaaaccgtcccctccgctcctacagtgcctccgtctacctgaacattggtatatacggaagtccatgaatcatcatagtttccgaatacgaagaacttctgaagattctgctccgttgtttcagtcacactacttctcgttgaatggttcacgaaagttccgaactggatcgcccggctctgcggcatatccacaacttcttcgttcgtacagcttgccagtgctgctacagccactccaagcacaaaaaaacttttcttcataagatgtaaaaaattaaattaaaaatttggttatttagtacctgttgttttattcgtttcagtcaatgggcagcggtatgtccacccattctccccagccgtccacatctacgtcaaagctgcctccgccttccagcccctcgtcgttggaaatcgacagcccgctcacgacgataacgccaccccgtggttgtcctttcacttggtctgtgacatcgaactcgaaggtcttgaacttgccgttcaccattctcacctccaagttcaggctgtaccttcgcccgtccgtaccgtttcgtccgtaatgttcacccggatagtcgggtacgccgaacgactgtaccagcgcttccgctccgtaatcttccagcgtacagtcgaacattaccgtggctgcggtttctccggtatgcccatcgttcagatagaccgtttcggccatgcctgccaaggctccgcgtgccaaggccacgtattgttgtccgctttcgaactcgtaacgtatcatataggtgtaaaccaatggacgcaaggtaaccggcagctccgtcggggcaagtgttttttctgccgtgtattcttccatgtatgccccgtaaagcatgtcgggctggttcacggtacgttcccccgcgtgcaattcatggaaagaactccgggtcacgccgcgtgtggtggctgtggcggattccgaagcggccacgccatcgaacacgatatattccgtatcattgttgtagaacaacagttcgtgcgtgccttccggcatggcgatccgtcctccttcatcgggcagattgctctctatacgctgtccgtcgctggtatagacttggacacgtattccgtcggccggagcaggacacaaatcttcatagtcgtacttccagtcctcttcccacaatttttcccagtcataggcgtaagtacgttcccattcctgttcccagtcggaagagagattcaccttcacggaaagaccatgctcgtcgtggtcgtaacacaggtctttccggcagctcgtggaaaggaatgtcaatcctgcaaacgtaagccccatgagggtatatcgtagcgttgctttcatcgtgcgcctcctttctttttatcggtatcccacaaccgccacacaagggcaaacttcagtttcaacggaccgaagtaattcattcggtttgtctgctggtacacgtagtgcccgtcgatgggaagatattcttcgtacttgctgtgcatgtaccccagaccgataccggcttccagcgagagccgccgtccgatggggaacatgtagccgtagctgacacccaccatttcggcctcgccctgatagccctctttgccgttttcaaggtcgtaccacgtgaagccgccgaacacgccgaggtagtggccgtgccacgggctgccttgcttctgtccgaaccaccagcgtccctccgggctgattgtagctacttggtaacatttgtgcttgccgtcattattccaccatgccatgtcgccttcgaggttcaccgtccaacggtcggcgatacggtactccacttcgagcgaaggcatcagtatcgcatcgtagagcaggttggtcttaacggccaaccgctgtactgtcggtctatgcggttgcacggtcgcttccttccgcaccgttgccggctcggaggccggttccgccacgctatcgggttgcagggccggttccggctctttcactttcgtctctttttgggaaatgacttttacgggcggttcgggtttccggtagcaggccaccgagaggctggagcgcagttcgggaaagaaattctccagcatgtaggtgtacggcataccgccccgcaggtccatgagctgtttcttgcgtccgtccactacgcgacctgccttgtcgaacacccatacgggcgtatggtcaaggatatgcagcacctcttccttgtataatatgtccgaggcggcgaccatctggcgcagcatgtcccacgcaataccttctccatgtatgcagatcaaactgtcggggattccggcgtggcgcacgagataggatttcagggagtcggccctgcgctctgacagcaccccgttgagacggttcacaccttcgggcgatgcccacgagcgtatcacgacgctttcaaggcggtccgcaccgtgttcttcacgcagggtgcggataaaacgctccagttccgcgcggttgtcccggaagagcacgtccacttccctgtggccctgccggtaatggatacgggccgagtccaactcttgcgcatgaacatacccgccgcagaataaaagaaataataacagtattcgtttcattgtcataattctgtctatgccaatttatttatatcagctatttattcaatctctgtacgtttgtccgtgccgtgcttctttctttagaggtaaaaaagcaccgaaccaacaaataatcagccggataactgtcagttatgccgatttatttgttcgttaaaaagactatcggaaaaaaggtcgtattattcggacactccgggaaaatttgtcctactcaaagaactgaaacgcaattttttgcagattttttttgtggataattcgtgtttttgtaattttgtggctgaaaacgaacgatttaaccaacgattaaaccaacgtaaaatcataccctccgtttttgcaactcccctttccgtcttatctctttctctttcatggccttatctatttccttatagcggctacggaatttcatgaatgtatcccgcgaaatgtcgaaacgcctgcatatatcggcaatcgtacagttccgcttcaacatgccaacgatgacctttcggttttcgatcagcacgttcattttcgtgtagctgccttttttccgaccaaggacgacaccctcggctttccggagggcgagagcctccttcgtgcgcatcgaaatcaggttgcgttcaatttccgctaccagaccgaacgcgaaacaaagtaccttgctgttgatggagttgtcgaacgaatacccctccttggttgtgtaaaggttgattcccttctccagacacttgcccatgatggccatgaggtccgtcagcgtgcggcttagccgcgaaacttccgtgacaatcagcgtgtcgccccgtttcatgcgccgtatcagtccccctaatttgcggtcgcaccccttcttcttgccgctggcgacctccgtcacccactggctgacggaaagatttctactgtcggcgaaacgccggatctcgtcttgttggttagccgggttctgtttgcccgtgctgacccttaaataacctattatcataatccttaattattttacgggagcgacattgcccccgtccggtataaataaggcatgatggttcgaaatgaaaggattctgtacataattgtatgcgtaacattttattcttcaactattttaatgtcttttcggaatctcgtcgggaaaaactggcacgtatgttttctccggacaggccgtaagctcgtgaaaaacataaaccgttacggaggaaatgcctcattcgtggaactgcatgaagtcggtgcctatgacaacagccattctctgatgccggatttgaaggggcaacgaatggaccggatgccccaaatggttggacgagcaatgctgaaatcgaatgatatgccgaaaaataaagaaaaatgcggtcttctcgacagtaagcaagaagccgcatttgtaataagtaccccgatttctgtaagaacgctttgtccggaagttgtccgttgaataggttgtgcttatttcaatgatttgcgtagcaacggaaggcgtttcagtatatggccgatagaaaggacagttgtaacgattcctgcccaaaaatgacattgcccgaccggggaacctgctccttctatgcctaacagggcaaatccggtcagaaccacggacaggaacaggaccgacagtaccgccgtgaccttgcttttccggcctattccgttcttggcagttcccttgtaccagccccaatgcgtcgctatatgaaatatggaggccatgaggaacagcaggctcgtcaggacatggaaaactgcccaattatgccatacctcgtgattgccttcatagtcggccacatgcaattcgattccggagtatgcggacaggacaaacacgggaatcaggctccagtctattataaaaatctttttcatctgtctttcggttttaatagatgcggcaaagttcgcatcttcgactggaaccggacgataacaaatgtaaagaaatgaactatcgcctgtttctgatcctcgacagggaaacagaagtaatccccaaataggaggcaatataatgctggggaatccgctgtatgatagaggggtgttctttcagcagttcttcataccgttgttggggggtgttctttatgcgggaaaggaagagccgctgataaacatggaagcgttcgatgattttttcctcgtatatctgccgtagcgcgggcttctgtccgaggtttctgaaaaaatcttcccgcttcataaccgacagttctgccggctctatgctttccagggaaaaaaggctcggtgtccgttgatacaggctgtcgaatgacgcgacgaaatccccttcgaaaaagaactggaaagtgatgtcccgtccttcgttgttgaaaaacaggcgcaggcaacctttccggatcaggtacattctgtcggctaccttgccttcttccaacaatatcgttttaggaggaacggataattcggttatctccggaagcgatagaaaataggcgtttttatcagagttcattgtcatttcatctttattcgtcatggtttgatagtgtattgttcatcacgtactcggcacaaattctgatagagactcatctactttaataacttgcgttcgctgccgccagttcccaatattctcatctgttgaatggctatctgattgagtttaatcaaccgctcaccctgcggaataccttggtctataaatactgcattgaggttttccatatttgagaggcaaataagctcattgattgtggcatagtcccggatattccctttcagttcggggtgttgctcacgccacatcttggcggtcataccgaacatcgccacattcagcatatcggcttcatcggcatagataatactggcttgtttggcggttacctctgccgggataaggttctgttttatggcatcggtatgtatgcggtagttgattttcgacagttcccgtttggctgaccaaccgagttgctgttgttcctcggtctttaatcgttggaactcctttataatatacagttcaaattcaacggaaatccagcttgcaaacttaaatgctatatccttgtgagcgtaagtgccgccgtagcgtcccgatttggagagtatgcctattgcgtttgtcgtacttatccattttgtcggtgataaggtaaaggcgttcagcccggcttcctttttaaacccctcgaattcgaggggtttaaaactcgggttgtacaaactctcccaaatacccagatattctattgtattccggttacgcagccagttcccgataaccgcagtcgggtcatcgcttttgtatcttgctatgtctgtcaggctgatataatcattctcgttgactgatataattgtgacacttgtgtcttttactgtaatctttgccattttatatttgattctttgggttttatgtacaaaagtaattataatctatgagactttctccttttcaatgaacaatatgacttttcctttcggatatagacaaggatatagacaaggtatttcgctacctccggtaatacctgcttttcccttatttcaatcatgtaaaatcaccataaataggtattgtccagtaaattcaaaccccgtacttttgcaaaaatataaacggaaacatcgttcattatttatgcaggtactcaaagaagacatacgcggccgcatattggcagtcgccgaacagcgattcgggcagcaggggtattccaagacctccatgcgcgagattgccggagccgtcggtgtcggtgtggggaacatatataattatttccggaacaaggacgaattgttctgtgaagtggtccgtcccgtcctgcacgctatggaagccatgttgcaggagcatcacggcatacgcggcgaggacgtgatgacgatgcgttccgaaaaatacctgaaagcctgtatcgacgaatacgtttcgctcatcgaaacgcatcgcagcctgctggagatcctgttgttccgtgcccaaggctcttcgctggaacattttcgcgaaagctacaccgaccgttcgaccgggctggtcaaggcatggttcgccgccatgaagaagaagtacccgaatataaatacggctgtgtccgattttatcattcacctgcatacggtgtggatgttcacgctgttcgaggagctgttgatgcacgcggtgcccaaacaggaaatggaatccattctgcatgactatattctgtttgaaattcaaggttggagggccattatcaaggtatgacagatagaaaagacacatacggacaagctgccgtaacggggcagcgggaaaagaggaaatcttcacaaaggtttcctctttttttattcgtgaacaaatctgaatatcgttcattaataaatatcataacaaatgaaacagagacataaattcgagagcattgtcgccgagacattgctcattccgctctattacagggcgaaagagagccgccgaaagaacccgattctgaacgacaaggttgcggaggggctggtggacagtctggaatacgactactcccgtttcgacggggcgaagttgagcgaggtcggctgcgtcgtgcgcgggtggtttttcgaccgtgccgtgcgccgcttcatagggaagcacgccgatgcggtggtggtgaatgtgggctgtggtctggacacccgtttccagcgtatcggcgacgggaaggccgtattctacgacatggacctgccggaagtcatcgcgctgcgccgcgagctgattccggagcagccgggcaacccctacattgcggcctccctgctggatgccggctggctggacgacctgcgtcgccggcatcccgatgcgcatttcatcttcgtggtcgaaggcgtgctgatgtatttctatgaaaagcaggtaaaaacatttctgcaccatgtggccgagcgtttcgggggcggcgaactgtggttcgacgtctgcggtacgatgatgagccgtcacggagtgaaacccgattcgctccgtgaacacgaggcgcaaatccgctccggtctgagcgacgggcgtctggtagaacaatgggaaccccgcctacgccttttggaacaggccaattacatgaagtttttccgtccgcgctggggcttcttcttcgggcaaatattgggacggatgacgcggctgtgctacaagttcagttcgatgttgggatatgaaatcgtatcgaattcccgtgacacggcggcaattctccatgaaagatgaaagagacgacgattgaaccttatctcccaatgttggaacggttcgaagaatttttcagggaagaactggcatcccgtttgtcggtcgaatccgttgattccgtgatggaagcggctgtcgagaattttcatcgtatctccgcaatcattccggatgtcccgccgacatcaccatgggtgaaaaacattatcggtatagcctatgagatcggtctgtggcaagaactgtcggccagaggatggagtccggcagaactttccattgttacgcagaaagcattgaaaaagctcacgttgtcgagtatcccttctgaaaaaatttcggaaatacgcgaaatgttgtgttcgcccgactatgtgcgtcgcatcgcttccgcttcgcatgtttccacagaggacgattggctgttcgattgcgtgttgccgaatgcggacgatacgttcgatgtcggtatggacattgcccggtgcccggtcgccgaactctgttcccgtattggcgtcgagtgctttttcccctatttctgcgtgaatgattatatcacacacgatgtactcggtatccggctgacacggacccgcacattggcacacggtgcttcgtgctgcgatttccggctgacaaaagagcggggagcggctgacggggctgttgtaatccggccggaagatttacaggaatttaccaacaacggatagagagaatcggataaaattcaatatatggaaacaaaagaaaagaagaaagaaggtctgtcccgcctgttcgagatcgcggggcagaagaaagggctgctttttctggcgggtctgctgtcggcaggcagcgccgtgtgtatgctcgtaccctattgggcggtgtacgaggtgttgaaagagctgctgacgcacggtacaagcccggcttcggtggacgaagccggcatgattcgttggggctggatcgccttctgcgggcttatcggcggactggtgctgctgtacgccgccctgatgtcctcgcacgtggctgcattccgcattctgtacggattgcgtgtccggctgtccgagcatatcggcaaactgtcgctgggttatctcaacaacacctctaccggagccatcaagaagacgatggagcagaacatcgagaaaatcgagggattcatcgcccacacgattcccgatttggtgaacgtagtggcgacggtcgtggtgatgctcgtcatctttttctcgctggatacatggctgacggcggtctgtctggccgtggtgctgttgagcttcgccctgcaattctccaatttcatggggaagaaggcacgggagttcatgagtatttactatgatgcgcaggaaaagatgagcgcctccgccgtgcagtacgtcaggggaatgcccgtggtgaagatattcggacagagcgtccgctcgttccggcagttcaacgccgagatacaggcttacaagacattcgccctgaaatgctgcgacacctaccagaacgggatgatcgcgttcaccgtcctgctgggttcgatggtgacgttcattcttcccgtgggtatcctgctgatacaagggaatccgcagtcgctcgcattggccgccgtatggctgtttttcatcatcatgggaccgggtgtggcttcgcccatctacaaactgacgttcctgggcggaaacaccaaggagatcgacgaaggcgtggcgcgtatcgaccgcattctggagaaaaagcccgttcccgaaccggaacaccccgaagtgccgcagtcgtatgaggtggagttccgccacgtgtcattctcctacgaaaatacggaacagggcacacgtaccgaggcgctgcgcgatgtttgcttcacggcgccgcaaggccggattacggcgctcgtggggccttcgggaagcggcaagtccaccgtcgcgaacctgattccccgtttctgggacgtggagcagggcgagattctcatcggtggcgtgaacatcaagaacatcgctacgacgcagttgatggataccgtttcattcgtctttcaggatacgttcctgttctacgacacgctgtacgagaacatcgccgtcggttcccccgccgcaacgaaagaaacggtcgtggcggcggccaaagccgcccagtgccacgagttcatcgagcggctgccgcaaggctacgagacgagaataggcgacgagggcgtgtatctgtcgggcggcgaggcgcagcgggtatgcgtggcccgcgccattctgaagaatgcgccgatactggtactggacgaagccacggccttcgccgatccggagaacgaatacaagatgcagcaggcccttcaatccctgataaaaggcaagaccgtgattattatcgcccaccggctgtcgtccatcgtctcggcggacaacatcgtggtcttgcagcagggacggatcgtacagcagggccagcacgacgacttatccgtcgccgaggggctctacaagaacatgtgggatgcctatacgagcgcttatcattggaagttgaacaaaaattgaatacggagatatgaaaaagaatagtttcttgaacgatattttacagaatacgagttgtccgcagggattctggggacggatgattttgcggggaatgaactgtttccacgcttcgctggcccatcgcggcatgaaacaggtggactggcggccggaatggaatgtgctggacatcggatgcgggggcggcgccaacgtgaagcgtctgctgaagctgtgtccgcagggaaaagtttacggcatggacctgtcggaggagagcgtcgccttcgcccgcaggcacaatgcgggagaactggaccgccgatgtttcatacagcagggcgatgtctgctccctgccttacggggacggggccttcgatgccgttacggccttcgagaccgtctatttctggtcttccgtcagcaaggcgctggccgaagtcttccgcgtgatccggaaagggggctgctttctcatcagtctggaagcgagcgaccccgaactcggaaaggcgtggacggagcggataaagggaatgacggtgtacggagccgaagaactgaaacagttgctgtcccaagccggcttttccgacatccgggtaattcagaaaaaagaagaactgcatatcgtcgcacataaatgaaaggagtggaacatgaatgcgattaaaaacattacgataggccatacggaacgtctttacaagcccgtgggctataccatgctcgccaatctggtcaacatcatacctttctgcctctccatcgaggcggtgcgcatcatcttcgccgcgttcgacggcagcggacgaccgctcgacacggcaagactgtggtgcattttcggcatattggctgtctatatgctggtgatggctttggccgaacgggcctcctaccgggccaatttcagaggagcctacgaaatgagtgcgtcggggcgcattgcactggcggaacatctgcggaaactctctctcggatttctttcccggcgcgaccccggcgatctttcgtccatgctcgttaccgatttcacgatggccgagacgggcatttcccaccatttgccccaactgatgggagccgtcgtcatgcccgtgctggcattcctctcgctggtatggatcgactggcggatggccgttgccatgttcgccgcactgccggtcgccttgcttgtcctatggatgagcacgagtgtgcagaaaaagttgagcggcaggcagatacaagccaaaatcaatgccgggaaccgcttggaggaatacttgcagggcattcgcgtgatgaaagcctacaacctgctgggcgaccgctttgtccgcctgcgcgatgcttttgcggaactgcgccgtgcctgtatccgtcaggaagccatgctggggcctttcgtgctgctgagcattacattggtgcgggccggactgaccctgatggtgctgtgcggaacctacctgctgttgggaggcgaactctcgctgctcgtcttcgtgctgttcctcgtggtcggctcgcgcgtgttcgacccgctgacttcggcgctgaccaactttgcggagttccgctacttctccattgccggagggcgtattctcacgctgatgaacgagccggagatggaaggcgaacggcaggcgccggccaccggcgacatccggttcgagcatgtgtcgttcgcctatcaggacaagaaggtgcttcaggacgtttccatcgcgtttccgagaaacacgctgacggctctcgtcggtccttcggggagcgggaaaagtacggtgatgaaactttgcgcccgattctacgacccgcagcaggggcgtgtccttttcgatggcgttccgatgaaagatatagaacctgaaagtctgatgagccgcatctcgatggtgttccaggacgtctatctgtttcaggacacgatacgcgacaatatccgtttcggaaagcccggtgcgacggacgaggagatcatcgcggcagccgagaaagcctgctgccacgatttcatcatgcgcctgccgcagggatacgacacgatggtgggtgagggcggttgcacgctgtccggcggcgagaaacagcgcatatccatcgcccgcgccatcttgaaggatgcgccgattatcctgctggacgaggcgaccgcatcgctcgacccggaaaacgaggtggaggtgcagaaagccatcgacacgcttatcaagggacgcaccgtcatcgtcatcgcccacaagcttaagacgatcatgaatgcggaccggatcgtcgttctggaagacggacgggtaaaagaacaaggcacgcacgacgaactgatgcggcacgaggggctttatgcccgtctgtggacgattcaagagaagtccgcaggctggaccgtatagaataacgggaagcccggataataggactttcacgaaaagccggaaagaaggcaagcccctcttttcggcttttccttattttatcggcattgtcgtaaatcagtacgacggcatagttactgtttctgactgctgaacgatgctgcgttattcattgttcgctggacctttcggttatggcagagacaagacggctacccggcctcgtgtccggaaacaccttattataattataccgaaaaatttccttttcaagtccatattctatacccgttatatcccgttcacctctcctttttatttattctcgttcttatcgctccctgccgcactcccttgtcggtgtgattttcccatgcgaaggtacagcgtcattcggtcgtcaagtaccgctccgctaaccggctcgcggatttgcccggcagccttcccaaatcgaagatgacctttcggtccccgccgtgctgcgctgtcgggttgggtattccgttcaatccccggcggtttccttgccttttcctcattttcccgctgtctggcctgcatgtaaaatctatcccgataaggaagccggaacagcttccgaaaaaagggaagaaaaagtttaacgaataaaaattaacgattatgccaaactggtgttcaacagcgtatgtgatagagggcgacgcgcaggaaatcaaaagcctctatgagttgatgaaagatttgcaggacagaaaaacgcctgccgtgaaaaacggcttcgggacatcatggctggggtgtcttgtggatgccttgggcaaggactgggacaaggtgagttgtcggggagattgggcaaacctcgaaatggtaggcgaaaccctccgctttacgacggagacggcatgggggccatgcaacgagacattcgacctcgtgtgcgagaaattcccatcgctccgttattattaccagaccgaagagccgggaatgggcttctacgagaccaacgacagcgaaggcaagtattttaccgacaaatacatagtcgatttatgtactgccaaaggcaaatacttctgcgaatattttgccgacagggagagcctgtttgcgtggcttggcgaggtcgcaggaaaaaccgtccgctcggaacaggatgccaaggctctgtttgaagaatgggcgcaggaaaaccccgattcttgctgcagtatcaatgaatatgtggtcgtggattaaatcggacagacagccatgagaacctatcattggaaagagtacggctttatcgggactgtacccgacttcgcccggcatttcgggatatgcaaaagcccgactttcgtcaatgcggtgcggagagtgtcccgacacgtttataactgcatgaacgcacgggaacaggcggaatatgaagagaagcgggagcgggtgaaacccgcttaccgcctctatctggacgaggaacgcacacgtttcatcgaaatgacgaaagaggagtacgaagctgtcggcctgcccgtggtgcaggaagaggtcggcatgttcaaactgtcttacaggaacagaagcctgcccgcatcgtttgtcggaaacggtcgggacgaaagccccgtggcttcggccatgaaaaaatatcgggcagaagccatgcgtttcgccggacaggtcatgctggctacgggttatttcaatacccgtctgccgaccgaacagcccaaaaccgagataaactatacggaattgcgattgtcgtacagcaacggtatcgtgttctattttgtcgctgaccgtagccgtgacggagtatgcggctgttacctgcaacggataacgctcgacggcaagcagatatataacggctgttttagccgatattccagcgtcgatgacgttttgcaaaagacacaatcgaacggagaatgccaaaatgcccattaccattttatagagtagacgataagccctctcggacagtaaaagttcgagaggactttctctgtacgccgtttccacggaacgacctccttttttagccaatgttccggcttttttatacagtccggcttcttccccttttactccactatcgtatctccttctttcccttatctcgtttccgccactttctcgccggttggattttcccatgcaaaggtacagcggtcgtccggtgtcaagtaccgccatgctaaccgctcgtggatttgcccggcagccttcccaaatcgaagatgtcctttcagttccctccttgctgcgcctgtcgggttgggtattccgtgaaatccccggctgtttgcttgccttcccgtcctttccccgctgtctgatctgcatgtaaaatctctcccggcaaggaaagctgaaaagcttccgagaggagggaaataaataactcggagtttaatttaacttttatgtattatgcacgcaaatggtaatcaaattatggaagggaaagttctggacgaacaggttaagataagaatttttgaggcattccggcagtcatgttttttgtttgatgaaacaagcggtcaatgcgcctatatggggtcggttcgtaaatgcgatgggaagtgtcgcctaatgctacgctttaagcagaatctggataaattgttttgttgaaaaggaattgcagccattggctgaaccttatcgacaagttcaatatagcggatagaaagatatattaatttttaatcttgacaagatatgagtataatatgtacacgatgtggcggtacgcaggtagtatgcgaagccacagtaaaccccaacaccaaagtgataacggaaatttccgacgattctttgcaattcggccggtgcgaaacctgtaaggcacgaagcgtcctgacggatgtagagaagacaaaggccgccatcaagagcggatttgccggatttgtcgaggcgaacggcaggaagccccattatgcaagttgtcggatagtatggaagtacaccaacgattccgaagacgtaaaaatccggctgctggaaagcggtgaaagtattggaaacgacatgttcttctcctgcaacagcctccatgccctcgaatctctggcggagttcggaaaagaaccgttcatcgtaacggaatgttacgggttcaagaccttaacagaagaggaaatctccgatgaaaaagcgtatgaatacgagttcggagacgagaaaatcgttgttacaggtaaagaagtacgtgcattttactcggaagtatacaggcagacggcacaggacatcgaacagtttgcagcctataatacggcaaaacgcatgtattaccggaaaaatgattgccagcttaccccggagcttgtccgacggttgctcgatgaagaacatttgatgaaagcaggtgaatccgacagtttcacgattcagttgttcttcctgtggcatgtgcggattcggaaagaacctgaaaattttgcaccgttcaaatacgctttggaagcctgttgcttggataacgtacagactttcagccgccgatacatcacgctcgaaaaagcattgcttcattgcctgaacggtttcaatgaaaacgctaatattcaaaaccgctaccaatccctgcaagactatcttctgggacaggcgcacggcaaacgctgataaatagcctcatgcggcacaagcctccgaacctgcaaagccggtttcgggggctttattccgcaaggtcgtctctccagttatatgccatacccggcatgtcacaagaaattcctttttaagcggacgtccacctgttataacccttataccccatttccattcctttctacctcccgatagcgtttcccgtttttgctcctgacgttacccgacaaatcaaggcaagacacacgacaccctatgcagctgcaaaggaacgtcggaggagttaaactcttttatatcacattcctgtgaatcttaataaaaaaagtcgttcatggcaccttgtggaattgatttttatatatttgcttctgaaaaaaacatactggaaacagtgccggatagtatgtgaagaacagaaacttttgggaaaataatatgtaaatacaaaattataaaaacaaaaaaatgattagagttgccacgataaaggatgcttcaagacttgcggaaatacagattttctctaaaagaaaagcctttcgccctatttttcaaaacgatgatgtttcctttaatgaaatgtcggtattgcgtcttgcattatattatcaggatgttataggagctttggacgatatatatgtttttgatgacgggattgtaaaggggatgatgaaactggattgtaaaaacagtatatgggaattgaaagagttgtatgtagatccgttctttcaaggagaaggtgttgggacaaaacttatgcgccatttccttacaacagcaaaaagtcacgatgtaaaagaggtttacctgtgggtgttggaagaaaattttgcagcaagaaaattttatgagagccacgggtatgtctatacaggaaataaaaaagagttttccgattcaggaaaatatctgttgaattatgcattacgattaaaagccaccttataatccggctcgcgttccgaaaattccgctttgccgggcacgtgaagtcccttggacggtcaaaaggttcagggggctttttttgtcaatcgccctcacaggcagattttcttttttagccgttattcccacttctatatacaatcgggcttcttcctcttttattccggttatcccattctttccctgatctcgcccccgttgcctcctcgccggttggattttctcatgcaaaggtacagcggtcgtccggcgtcaagcaccactatgctaacggctcgcggatttgcccggcagccttccgcaaatcgaagatggcctttcagcccccgcctcgtacctcgacgggttgggtattccgtgaaattctccggccgtttgcttgcctttccgtcctttccccgctgtctggcttgcatgtaaaatctctcccgccaaggaagccgaaaggctccgaaagcagggagaagaaaaaagcaagttcaacaaattaaaaatttaaagttatgcacagcaagatttttcaaattaccgaaacacgggtgagcaaggacaactacctgaacgaggacaccctcacgcagggcgacgatagtttctttgactattgtgcggagattgacgatgaggaacgccagttccatatcgacaacttggtaaacaacattctgcccaaaggcatgttcgagcttgtttccgacgataccatacgctacaaaggcggtgcggaacgatggagagaagatttcatcgcagacattcgaagcagggcggaagcccttacccccgaaagcgtgcaggactggattggcccggtctatcaactcgaaaagttcctgaaaaacccgctcgataccgcttactggttctacatggacgaggaggggctgcaatccaacgccgagcaatcctacgagttcctgcggcaggcatgtgaatttaaacccggtacgctgctttacatcggcggtgtcatcgactatcatttttaacctcaaaacgctgaacgatgaaaggtacggaacatttcaaacggactatcaaggaatacttggacggcaaggcacggacggacgaacttttcgccgtctcctatgccaaagaaaacaaaaacttggacgattgtatcacattcattctcaatcaagtcaaggcaagcggctgttgcggaatgaccgacgacgaggtgtggtcgctcgccattcattactatgatgaggacaacatcgacgtgggcaaacctatcagttgtggcgtcgtggtcaatcacaaggtggagctgaccgaagaagaaaaggcgcaagcccgaaaagacgcgctgaaagcctatcaggaggaagaaatgcgcaagatacagcaacgccacagcaggccgaagccgaccgccaaagctgtacagaatacccaaacggaactctcactcttcgatttctgaccatgaaagcacggacaaaatttcagcatcaggtagtagccgccaacgggcggttgctgcctatcacggagaaacaggcagaatgggcgttccggcataccgtcggacattacgcttttcgtacaccgagcggacaaacgacctgcctcgattgcggtcataggtggaacgagacaaaggcgaagcgttgccattgcccgaactgccacgccaaactgacgctcaaagacacgctttgccgcaagacagatgagaaaagctatttttctgtcatcaccacgcaggacggatttcaggtgcagcggattttcagaatgaatgtctgttaccgcaaaggcaagaacgcatggacagacgtgtgcgaagtggcgagatactggttggacgagaacgggaaaaccgctttgacagccttgcaacggacaatggggtgttatttggacagctttctgtacgggtcgggattggaactgcggaacgacaattacgtgtaccaacgcatagccgactgttatgtctgtccgggctacacggttatcccgaagttacggcgcaacgggctgaaagggtcgtttgccgacatcgccccgcaaaagctgatgaaagccctgctatcggacagccgagtggagacaatacttaaaagtggacgcaaacgagacctcaagcacttcatcgaccacccgcaggatttggatttctgttggccgtcctacaaaatcgtgttacgccagaagtatcggataacggacattggaatatgggtggattatctccgtatgctcgacagatgcggcaaggacttgcacaacgcccactatgtttgccccgccgatttgaaagccgagcatgacaagtatcagaacaaggtgcgtattctccaagagcaggaaaaacgcaaggagcagatgaaacgggcgagggaaaacgaggcacgttttagggagttgaaaggcaagttcttcggtctggagttcacggacggaacgatagtcgtccgtgtactggatagcgtggaagcctactacgacgagggtaatgcgttgcaccactgcgtgggacagtgcgaatattacctcaaaccggatacgctggtattctccgcacggatagaggacaagagggtcgagaccgtagaattgagcctcgaaacattcaaggtgctgcagtcgagaggactgtgtaataaaaatacgaaatatcacaagcggattatgaacctcgtgcataagaacatcgcccttatccgaaagcgcatggccgcctgataccggctgcggaagttatatcgggcaaccacctgccaatcgggacaggtggttgttcatattcccgataaaggccatgtcgaacattctgttatacagacaattctttttccattcccttacattttgtccgatggacaatcgttcgacgttttttttgccctttataccccagacacatactgccgtcgtttcctgttgtaacggccggagatctttgcctccattccctttgtatgcttgggcgtatcatttcatggaatctccactatcgccacggcctgtttttacgcagcaaaggtacggcgaacgaacagcgtgtcaagtaccgcttcgctactccggataaaatttgacgcaaactttccgcaatcgcagattgcggcatttcataaaattttaacctccgttccttgcctgctgttcttgctttcgccgttgggaattgcacgtaaaaatcaaccctttgggcgaagtcggaaggcttcaagaaaagggaaataaaaaaacagaacaatgacagcaatagaacagattatcgccatagctgaacaattaggctggcaagttaaaaccgataccgacaaaccgaacctcgtggtgttcgattttcagcaatacacacctcacgggcaggatttcagtttctcggttgagatgaaaggcaatgacaccgacagcttgttacaggaagttgaaacatattacgaagacttcgaccccgactatgaagcctacctgtggattggtacggacgggcatggcaagaacggcgcaccttaccgaatcaaagacatcgtgagcgatatggagcaggcggaagccatgatagaaaaactttatgaaacattaaaaacaaccatgcaatgagaacgaaaaccctctacacacgagacgccgaaaaggcaggaataagccgtttcccaaactttcaccgcacggggaacataaccggcatgaagcagctttactacggaaaaaacgccctattggtacgttgcgggagtcagatttacaacgtatcgagcgaacccgaaatttactacaacatggctcattaaatggtattcattatgaaaagagcaagttacaagaaagattttcagagttggaaaggcataatggctctaaaactgctctgctgcaatatagttgcaggccgttttgattggaagaaatactgtacgccacagtcttattgcggtcaggaaatttgcgttgtaccgctgcattgctcctacggacagataggctataccgtgcacttcccttattccgatataccggaagtggaatacgattgggaaatgaacaaattaactatcgacaaagagaattgggaaagctatttaacgtgagtataattcaaaatatagccagttgcccgtctttgaaaaacatacatcaatggcgggcttctttcaaaaacagtatgctgttatggtagaaagggagttggaaataaagttatattaaaggaagtggggcatggaatattcaatatctttatcttcaaccatatatttttcctgaaattgagcaatttctttgcaaaaatcatctgtcatacaataaatctccgtaattttggtctctgaaaacatcatggtaattgcttaaatgttaattgaatactataaattcaatacttttattgctatgtgcctaatttatttacagaattagaattgaaagaatatgacacagactttttatacccaatggcaatcttctgtccttgcagacgcagaaacttatgtttcaaaggaatacagcctcaaatccgcaactacgcgcctaatatgatacagaagcgaaaagaatctgcatcgttagtaaaaagggggcacagtgcatcgaatgtcaccataaagacatataaatgccccttaccccaccatgcgacttgaggcaatacgcaaaatcacgactataagttgtcggtgttatccaaagtcattctggaacacattggcataagcattgttgcatgaatagatattcagcacatacttccttgatgtcctgacccatttggctggcacagagatgaacttaaagacaaacgtcttgatgcggcttgttgctttgagtccgaacctcttcacgtcaagcctcgccatgatgaatttatagaagttgcgtatgagtgccataagcagaagaaacaccgtgttttctcccataaaggattttggaagcctgttccagccgaatccgttattcatatcatcgaagatgcgttccttccctccacggaggttatagaattcgacaatctctttctcggaagactcgtagtcatttgtaaggatgcagcggtaggtgtattctccttcccacaggtcgagttcgccgtctatccgcttctgtctttgaatcacaagacggtatgccttccctttccatttctcgatgagaatggaggccagctcaaactcaatgccgcccaattccactttcttccaacctctgagggcaaagatgtcattgtagagcgaactgcatcggttagcacggatatagaaggtcttgcagtgtttagcaatctcttccactatctcttcagaacacgagccgcaatcagctctgaaacggttgataataagcttgttttgttcaaacctttcaaagaacctcttcagcgtgtccttctggtggaaacggacatttgtgttgccgtcgctgttctcaatgccgacaatcaagttgccaataaccgccacgccagggcgataaccaaggaacttcttgtatgtaggcttcgcatcaaacttctcagcctctatgaactggtggtcgaagtcaacgtcatacccctcgccctctttcagctgccctgtggacaataggcaattgaggagcagtgtattcagcttgtctgccgtgttgaagtcgtaggtcttgccagtgtcggatgtgtaggaaatgttatcctgggtcagttcctttatggctctaagaatcgtgtcggcactgcatgtgcgaagtgtcggatgaagcgaaaggtggtacatcagatgagtggtgacatcctcgatgcatgagccgccacaaaaataaacgctcataagcgaacggatgatttcgctgtattgataaccatacagcctgcatctcataccgagggttgagtcgattacagatgagagtctggagtcaaattgctccattattgaaaatattcctccaaaaggagtgagtttctcggatttaattgctacctttgccatgtctgtcgggtttgatacatattttgatttgcaacactaagataggtgaaaaatctgacatggcaaattcctgagcaactttttgttgctcaggtacttaaaaagttatatttgtaatagtgttgcggaattaaggtacagtaatttccaaacggcattgctacgtgaaatatccaaatatgcagaagccgtggatgcggcggtcgtatccgagaataaggggcattattatacaagttgctttattgaacgtaatggtaagtttgtatacataaaccattctgcggatgtgcggatggatgatgggataaagatagaactcggttcgttcatgatacggactgcccggcacgcaaaggattataccggcggaaacaatcaatattgcgatatgctgcagttacagtcaatgattgacaaactgctgtcgtaatgataacatatagtctgtagcggaatgaaaaccggtagggactataaggatgtggagcgccttcagtatgaaatcgctccacattcttcatattacgctgccgttaccgacgcagaccgccgccatattccgcctcttgtagctcctccctgtattcttcaagctcgttcagcttctcgttcacggcttgcaggttggcctccagcgtcatgttgtggtcataagggtaatgatgttgtacggccatccctgcattggtggccgtacccacgtccagcgtatccttgtccctgttgtaccttgcatacagaatatctccgtttggcatttcgaataccggcattctctgatgtgtcagttcagcaaactgttccgccgccatatctttggccacctctttcacatcatcgctggcacggtctgtgccgtaacgtgtgatatggtcccgcacctcctgttccgtgtatttcagcatgatgtcgtatgtgcctccgacacttccgttgtacaccacggcaaagtccttatcttcaatcagcaggtcatcgccccggttctggaggggagaagcgtatgtatgctgctcgtccatgccgttgccgtcgtaatactccttggcgagcgcaagcagacccttgtagtcgcctttgtccttcaattcgtccagttgcttcgtgtcgtcagcggtttggagataggccaccgaagcataaaaaatacgttccttggcagagcgtttgtcctcttgctcttcggtaacattttgttccaactcctgcgcaatcttatccaccttttgagtaacgattgacgaagctcttttcacgtccagaagcgttgtcttgataaactgtggggattctttcaactcatcgagccaccctttgaggtatgcgcaactgtcttcctttatatgcttggtcatgccgtagcgttgtgcgaccaacgcgctgcccagttcggccaccagttcctcgcgggcatactctttcgaaccgaaagaggtaggttggagtcggtcaagcacaccttcggcacccgtggaatggaccatctcatggaacagcgttccgtagaaagattccccgtctctgaactgctccttttcgggtacgacaatctcgttctttgtgattgagtagtatgcttcgttttggtgcgtcggtttgatgggacaaatccaaaggttgtcctttatcatcgcatcgacaggcccaaaactgaaatgttcgccgttttcgacccttttcccgttctctctttccaactgctcccataactccggtcgagcctcctgcaggttggtctgggcgacattgaacacccggaacacctgcattttcggatagacattgtattgcgccttctcttcgtcggagagtttcttgtagtcgtcgtacttgattttctcctttgtttccttatgtatgcaggtgaatgtggtcagcatgacgggaaacgatttctcgccgcgcagtacagatacacggggtaattcctgcccgtccttgccgggcttgttgagccgctgcacgcagtcaaaggtgcagaagcgcggaatcttgtacccctcattctcacaatgcaacagtaacataagggcgttcataccgttgtactcccgcccggaaaggttacgcggccattgcagtgccccctcggtaaaccacggcttatgccagtccttgtggatgctttcgattttctcgatcattaatgtctgacatagaattatgttgggcattagtctaaacaattaataatcaatcgttctttgacattttgcacaacataattctatctttggagggattagagactatctaagaaggtcattaactccttatcctctgaccattttcgtgatggtgcatcagaaacggactgctcacattttttgagagcttctaatttcctctccatgctaatttcggcgtagatgttagttgtatcaatcgagctatgtcccatccaatttctaaccatatcaatatccgttccagaattaagtagatgagtggcggttgtatggcgtataacatgaggagatgggcgttttttagcaagagatggatgatttaagattacatcttgtgagtatttctttatcatttcataaatacagaatcgactcataggctgattgaatcggttaagaaaaaggtaatcgtcaggcaacttgttgtctataaatggcttgagtaaatcccagaaatcctcccatagaggacaatttctctctttacgccccttgccatgtaatgtcaccattggcattccacgttttgaaggcatcgcaacatccttcactttaacaccaataacttcagacactcgggcgccagtattatacatgaataagataatgacatgatcccgatttcttatcccttgatatttacatgttttcaatggtgcagcagccaaggcttcgatttcagatttgtccatataggttatcatgcgtttttctgttttctttgaagggataagattgacattgtgacaccaatctatatgttcaggagatttccacgccagaaactttgcgaaagcctttattgcagctaaacgattatttcttgaagaaacggtaatttttctctcaaattccagataatcaagaaattttgtaataacgtcagtcgtaatatccgagattttgagattatctattgcaatacttgttaatgtcgagacatacgataccaacatgcggaatgtatcacgataactcatctgagtgttacgactaaggttgcgagtgacaattaagtactctacgaggaatggtcttagccaatagccaagatgttctgtttcagcaatttttctatttttcattattcgtgtttttataagcataaaacaatttgtttgcttcctgcaataaagttggcgtctttgttagatagacggaagtgaaggacacgttaagatgccccaaataggtagacaacttcggcagtaaatcctgtacgttctttcctgatttataccagttagtaaggacgttgaccgcaaaagtatggcgaagatcatggattctaggctgatggcgtcctctatcagggaaataaagacctgcattcttacgaatggttgcaaatatctgatgtagagataccaaattaactggttttcctttcagatttatgaaaacgtatgactcctcttccattgggtacatttgagtccttcgccattgtaatatatcttgtatcaatcttgagacttgttcgttgaaagttaccaagcgtgacttgtagaacttactacaatgtatatgcacgtacatattatccatatcaatatcctcaatttttaaggataaggtctcacttattctgagtccaagcacatacgtgatcatcaagatatatcgtatacatattggctcattaacaagtggtctatatttgcgatatgtaagcgcacaatcaaatagtctcttcagttcgtcatccgtatatatgtaagcgggataatactctggagctttaggtagaaaaacgggaataggtatgttttgaatgagtcctctggaaaaagcccactcgaaaagtttcttcagaatgcagtgctgagaatgccaatatctggtgatgacatttccttttctgtaaaggaaggcattactatcactttccgttattgaagttaattctgttgtttctccaatgaacttagcaaatagtctcaaagagtaggttgtactctgatccttgcgaccaatagacgtacgaaacttgataaatgactcaacggtttcttttatactcatagaaactccccccagtttatatttgaaacatctctaagtgaattgagatccacttttgcatatactcttgtcgcttccatacttttgtgacctagtaaatcaccgacttcctttaaggtttgtcctttgtttatcaagaaagttgcatggctgtggcgtaaacaatggggtcccttgtgcctaacttccatttcactggatttcaaatacctatatacgacggaagctatggctgtacaagatataggacgtattggggctggtgtacaaaagaacaagttgtcgcttcctatgtcatttggccttccctgttttaggtaagcgataatagcttctcctacattatgtagaagtggtaatacttgtggtcgacaattctttgcatgcttaatataaatttgttctttacgccaattgatgtcgctaaccttcaagttcgcaacctcactacaacgtaaaccgtacatcgcaagtaacataaaaatagcatagtcgcgcgatgcggatttacctgtttgttcttttacggtttgtaacagtttttgaactttatcccacggcaagaaagaagggagattttcttcactgtatactttgggagtgattaaagctttgtctaggtcggcaacacaccaccccttttcgactgcataacgtagatatacacggacacaacacaggtactctttcagtgtattacgttgaaccttgttaaccgtgtagtattcaatgtatttatctatatcttccattgttaaagggtatgcctggttctccttttctattatcttgtaaaaataagtgagtatcctcaaatccgcaactacgcgcctaatatgatacagaagcgaaaagaatctgcatcgttagtaaaaagggggcacagtgcatcgaatgtcaccataaagacatataaatgccccttaccccaccatgcgacttgaggcaatacgcaaaatcacgactataagttgtcggtgttatccaaagtcattctggaacacattggcataagcattgttgcatgaatagatattcagcacatacttccttgatgtcctgacccatttggctggcacagagatgaacttaaagacaaacgtcttgatgcggcttgttgctttgagtccgaacctcttcacgtcaagcctcgccatgatgaatttatagaagttgcgtatgagtgccataagcagaagaaacaccgtgttttctcccataaaggattttggaagcctgttccagccgaatccgttattcatatcatcgaagatgcgttccttccctccacggaggttatagaattcgacaatctctttctcggaagactcgtagtcatttgtaaggatgcagcggtaggtgtattctccttcccacaggtcgagttcgccgtctatccgcttctgtctttgaatcacaagacggtatgccttccctttccatttctcgatgagaatggaggccagctcaaactcaatgccgcccaattccactttcttccaacctctgagggcaaagatgtcattgtagagcgaactgcatcggttagcacggatatagaaggtcttgcagtgtttagcaatctcttccactatctcttcagaacacgagccgcaatcagctctgaaacggttgataataagcttgttttgttcaaacctttcaaagaacctcttcagcgtgtccttctggtggaaacggacatttgtgttgccgtcgctgttctcaatgccgacaatcaagttgccaataaccgccacgccagggcgataaccaaggaacttcttgtatgtaggcttcgcatcaaacttctcagcctctatgaactggtggtcgaagtcaacgtcatacccctcgccctctttcagctgccctgtggacaataggcaattgaggagcagtgtattcagcttgtctgccgtgttgaagtcgtaggtcttgccagtgtcggatgtgtaggaaatgttatcctgggtcagttcctttatggctctaagaatcgtgtcggcactgcatgtgcgaagtgtcggatgaagcgaaaggtggtacatcagatgagtggtgacatcctcgatgcatgagccgccacaaaaataaacgctcataagcgaacggatgatttcgctgtattgataaccatacagcctgcatctcataccgagggttgagtcgattacagatgagagtctggagtcaaattgctccattattgaaaatattcctccaaaaggagtgagtttctcggatttaattgctacctttgccatgtctgtcgggtttgatacatattttgatttgcaacactaagataggtgaaaaatctgacatggcaaattcctgagcaactttttgttgctcaggtacttaaaaagttatatttgtaatagtgttgcggaattaaggagtatatctttccttcccttgatataggcatgagaatatctcctgtatgctaagtgattaaggtattcatttatgcgcattcctgatattgaaggagattctgattctggtagcatatgtagctctttaagccacatatttgcaaaataggtgaagaaactgtaattagacttggtaccttttttcttgtgagaacctttgtcttccaggttttgccatttttttgctgcatttgagatttcctcattggtaacagtacggaagttctctaaattaagatactctattagatgaagttggtactgtgcataaagctgaagtgtctttcttttaaaaccttttgatttgcaatccatcaagaaagacattctctcattataaaagggagcagcaatcagtctgactttgtgccatttgcgttctgcgagataattgaccatttcatcttgataacgaaaatctaaaaggcctacgtattgtaagaaatcaaccgccatctcaataaatttgattcgcgaggaagggcaatcatgatgtttccgagaatgataatgaccagaaatgggtgaagaccatagacgtgctgcttcaacgacatcatcaagagatacaattctcttttttccatcatgaagatcgaaatattggataaacttgagcgaatacccagcccaacccaatagtgttagccgggacaacccttccttacttttcatagtcagaaaggattctcgctcctttaataatggtgcagccaaatgttttttaaggaatggcttgcggataataatttgttctaacatgctcttataattatgtgagtaatacaatataatataacgagcatctataattatgttgtgcaaaactcgacaagaactctaattatcaagtaaatatgaaagaaactgacataaataaatgggtaacattaatgatcttatgttgagttcaacataagatcatcatctcggcaaagaggtccagcgccttgtcctcgctgctcggcccctccgtatttcgctttctataaccggccatgactgctactgattgaagttatccgattcgggaatatattgcgccagttcttccacccggcaggagatgtccggcttcccgttatgtaccgagaccgtcatttcgcccttggcttctaccttgacgcccggttgcagccactcttcacgttgcctgtcgaagcagaagaaacgcacccattggtactcgaaattctcatcgaccttttcggtgctgaatgcagagaacatcgtgtaggacttatcctttttgtccttccgttcctcgatgttcttgcccaccttgccccggaacgacagttcgcccttgatggaatccgcgatgtccgccgccgggccgatacggtcggcaaagaggttgaaatagagcttttcgccccggcgtttcaggaacagcgtccccgcaacctcgacacgcaatccgtttcgatagccggataccttcttctgaccgccctccttgctgacactgatctcgaccgtttcgttccgaccgtccttgccttggagcacgacgcggagcggaaaggtcaggaatgttttctcttctttggtcgtgcgcatcgaagcgtcgcggccgatggtgccgcacgccgtaatattgcatttaatcattttattttgtcttttagtgatacatagtccaccggacaaagcggggtgtcttgaagttgaacaggttgaaagcgtttcctaatcgggagcacgtattctcatgtagacaatccagccggcaatacccagttggacgcccacgataacgagtgttgctacccaaccgaatagccgggaacagaacaggatatgcagggcgcagacggacaccccggacaagtacccgcaaagtcgtatcatcacgcgttttatcatgactttttgggattatcttttcaggttttccgattgtgcccgttgttcggacattccccgttcaaagttctgcgacgccgcctccgagaggatgaccgtgttcagcacgccggtcacacgcagccgtttggcttcctccgaaagagaactgtcgttcagcgtcaccgacaggcggcttaactcggcagaggccagttcccgtgatacctgaacgctgccgttgtccgcctgcaggacagctcgcccgttttccccgactgtgaggtcacaggttttcatgcccggcagcaacgctttgaggtcgatacgccggctgtccatcgcctcggaaatggctgccttttgttcctccttgttcttgctgtcgatttgcgtcgccagtaacatcagggaggtaaaggcggtcatggccatttccacgacaggatcactgcaccccgacaatcccacgccgctatcctccgaggagagcagttttttcatccacgcatcgggcgaaaggcttttgccggtggcattctcttctgttcccttatatcgggcgagcaggtcgttgccgttatgtagtacctgctgtttgatgtggcccttttgtgcgatttcagccagatacgctgccggatcgacgtcccgctgcgtgccgtccgcataaatctgccggacaccgaagtgcaggtgctccccggtcgtccgtgtccccgtgttaccggaacggccgagcttctggcctgcctgtaccgtatcgcctgcctttacggaaacttcgccgaggtgcatgtaggtacactgtaccttgctgccgtccggacgggtgtattccacggtcagcgatttgttaccgggtgcatggcctttgtctttgacagcgacgaccttgccgtctttttccgtggccaggaccgtatcgccgtcgcaccggatgtcgatacccgtgtgcatacgttccttgccgtctgccggatcttgccgcataccgaatggcgaggtgacgaaaagaaactctttccgctccaccggaaacgaatagtccactgtatttccgacctcacggagcgggttctcttccacgccgaaccgctttccctgcgtctccatttcctgcatgacctgccggtcgtacttttgcagcccgttctgttcgatgatacgttgcaggctgtcggcataatgcccgcccgtggcatagcccgccttttcgaggccctgtgtccagcccttgtagtcatcgggcgagagcgagaaacagcgggcatagcggctgttctctttcaggaagcgtgagtggtgctcatacgaatcgcccacgctgtcgtagctgcaaaacttctcgttcggcttgtcatcggaatacagaccgtaccggccaccttcggcaatccattcgggcgtggccttgatgccgaaatggttgttctcattcacggccaaacggctctgcccgttggaactttccagtatgccctgtgccagcgtcacggaggccggaatgccgtacctccgcatctgtgccatcgcataatctgcgtattgttccgtatattcttgattcttgtttgccatatctttacctcctcatggttggacgttgttcgttctcgttctgttcgtcagttgcctctgcaggctcgttttgctgcgccttggacataccgtcacaatccatcacgtatgcccgcagcgcatggatttgctgccttgtttcctcattgctgtgttcaaataccaatatgattttgtccgcatcatacggaatgcgttctttggccggaggcatgtccagctcgttcgctatggtctccgcatcatacatggaagcgtaatacttgttctcatgtttgaaaaggacgaccgcttccggttgttcctctttgattttcttgtatttgtcatacagttgttccggtatatcttttatgggcaactctttcaaggatgaagcagttttgggggattcctcattggcttgcttggggtgcttgtccttatcctgctgtagggtatcctcttctccttgtttctttccggcagtctcttcctgcgtctgtcctttacgcagcacatcggcaaaaagcgtggccgccagatggcgtttatattctgcacggtcctcggccagccacatgcgctgccactgttgccgcgtgacgctccggggctgcagtttcttcccgtcgatggtcgccacgcacagagttccttcttgtttggtcttgaatacggacacacgctgaatccggttcaggtcgatgtcctgcgccccgctgctgaacaggtccactttcaggtctggctgtgtttccgccagtacataatacttgtgcgccagttccatgcgtaccttgtcgatgttgtccatcgcctgtttgagcgtggagaaaaaacggttcacgtcctccttgtctggatagatactgtacccgttctgatgttcgggcttcagatacagcgcccagcggttcttgtcgtcctggatcatctgtatctggtcgaaaccgatttcgtccgcccgtttgaccgcaggcgtcacgtccagtgtggaaagcatctccagtgcccagttcttcagtcgggccagtgatacctgtttcttggcgaaataggcatcatcgggcctgtacccccatgcgccgtcgggattgaagaaacgcacgttttcaataccttcccttcgcaaagccctgccgatacgggccttgttcatgcccggcacttcgttgtccacctccggcgacgcaccggcagggagtatcacatccgccgatttcgaggacggatcgatgacgatgacaatggtcttgtcctccttgttcgggtgtttccggatttcatcggccacgtagaaatgcttgggtaactgctcctgcatatccgaagtctgccggcggttacgcatcgtggcatattcgattttctcgccccgttccgccttgtggattacttcgagggcgttgttcacgtcgctttcgagggcatccatcaggttggggttctctttaagttcccggttccagtagtctaccaattcaaggcttttgtcggacagacgggcaggcagtcccagttccagcattttgatgcccgaagccacctccacgatcagccgttcctgtttgagggcatcttccgaaggacccatgccgtttttcatcaccatgccttcacgggccagccgttgttggtgccccgtggcgctcacgatttgccgcaaggcttcctgaacgtagtcgttataatgctcgaagttccgttggcgcggcatatagaccgcatcgcggtccgtctcgtaatggggcattccgctgccgtccgaacgcacgggcacgagattgtcccgcattttcagcaggaagtcgttgaagcggatatgcagtctccgttcatcggtttcggagtagccacgctccacggcactaccgtctttctgcaataccgcatcgtaagtctccttatccacgtagggcagtgtcgtctggtcgatgttgaaaagtgtgcggatctccctgttatgtatgcccttgtactgtttctgcacctcctcgtccagtttcagataagcgtcccggctgatgatgtcctccggattgttgcggtggacgtacttgttccagttgtagaacaggaacggaacgccttgctcgtgctcgcgtaccgatgtgccgcgtgccttggcatcgctgtaaagggtgaacaggttggtcttgcacccgttccggtccgaatgcaaggccatgaacaggccgttgaacgggctgacggcaacacctttcggataaaatttcggaaagcccttgcccgtagcgttgagccagtgtcccccggcattcgacgcttcgttcaaagccgtggagagcagctctatctgacgctcctcggcattcttttctatttgcgatttttctttcatattcccatatttttatcggttacaggattattgaatgccccgtgtccgcacgatggtttcctgctgtccgttgtcatagttctgcgaagccatctggcggagcttgtcgctttgggcgagcacggcattggccagcgtgttcagcggcaaggctcctgcacggtaagcgtcggccatagcgggggtgagctgcaccgtacagggcacacggtctatcgtggcaaccagcgtgcagccttgtagtgccgggttcacgatacgcggattcagcggctcgtcgggatagcgtctgtactgtacctctctaccggtcgtggctgcatttctgtttccctccgtccgttcttttcccagcacctcgtgtcccgccttgttcagcaggttcgcgccacccaagccgataagcagcatcttcaacatcggattcttgacgaacatacctgccactatactcgctatcggcagcaggttgtctttcaggcccagcgattgtgtcctacctgtaaacacgcccagcaggatgtcgggcagcatggccagtatatagcccagattacccgcgacatcgcctatgccgtccagtccgagcgagcggaccagctcgtcccagccgttctcgttggtctgtatggtctgtgttccctgacctgcctgttcctgccgcatcccttcccccgcagagacggcggaagtcgacacttccttttcctctttttccctttgtttgggtttcgattccgtctgttcctccgtttcggctttccgtctttccatatcttgcaggtaggcttcctcttgtccgggagcgacaaccatcggcacgtctttataccgttccacccgtttccgttcctcctcggcggtttcttcccgccacggcatatttctattgtctgttttccaccagtccataaaatcgaatgttacaatcggtatcttcttttgcaactttccgttggctgcggcaagagccgtgttttctttgcccggtatgcttgccgcctctttgcggaagctgtcgaacacgttgctgtcgctgccgaacacgcccttgctgatacactcctctgcagagagcggctgcgtttcctccttcccgaaatggtcggcaacggctgagattgccgtatccgcaccgatgaaccgtgcaacggccgtccacgaacccgtaccgcccaacatgaccgtatcggccgaagcccccaacacccagcccgcacctttctccaacttgctcggccggtaggcaacctctccgcgtttttctatctcttcggccagcggcgagcgccccaaagcctgtggcaatcccagcaggctcgattctgccgccttacggatgatgtagtccgccgaggatttgggcatacgttccttgaccagttggtctatcatcagttgctctacacgatagtccacgaaggcataggcgaggtcgcagcccaattcctgcgacagtttatcgtaacgctcgcgtccgacttccttcacaacgacatcgcgccactgtccggccatgtaggcgaggtcgtgctgcatctcctccgacgagagaatcctgtccttgcacatcccgatgtagtcctcggtcgtcttggagttccactctcccgtaaccttgagagtctggtacgggtcggcgagcggttgccccgctgacgccatcatgccgagtatgccgcccagggaggtcgaatacgctttcatttcctcgccctgtttttcggtcaggtaggattgcgtctgcgtcatgacggggacaagatgatggcggaaataactgctcatcagggcctccaactccgcaaaccttctgctatgtttgattccgtccatataatcaatgtctttctatatcatgtttatttgtttcaacagttgttccttcgtctgctcgatagcgttatggtacacctccatttgcttggggaaaaactcttcgagccacgtgtccttttcgatattgtcgtgaatgaaacgtatcgcctgttcccgctcgatttctaccgaggcttccccttcctcccggttgttgaaccatgccttcgtccaccagcggactccggcacggtcgggatagacggagacgattctcggtatgtcgaagctctggatgtcgatgtccagttccgccaacggatcaatgagtccgctgcccgctacggcttcgtcatgaagtttttttttacctcgccgcctgttgcggaaaggtacacatcatgccgcagggcaaggtagttcaggaaatccgctatcagcaggttctgtaccttgcaggccagcggcatggctttgcgccccagtcccagcgggttgtacatgctcggcatcttctcatagaaatactccttcgcagctcccattgtaaagatgtggcgcagcgactgctccgtatgtgcgggcaccgtgtacgctccccgctgtaaatcctccatgtaaagtggcagaaagcggagcatcagctcttctatttccctttgatccttctcgtagtcgttttttactcttgtttccgcatcgtaaaaagacgccgcaccattgccgtcggcttcctgcaaagccttgatgttgccgtacaacatggtcaggaactctattgggttcagttcctcgcccttgaatttgacttctatatgcagcagttcgccgctcaaagccaccgtttgtccggctttcacccgctgtccgaattgggcgaatacattcgacagatgaccgtatgtcacctcgtacccgccgtaacggaccgtctggcaaatgccatgtaccgggtcgttgcccacacctgacacgatgccgctggccacggctgacagcatgtaacacctcacgttgaagtctattccgtgatgaaagaacttttctcccgttgccgggtgtacctgttcgccgtagccgagcgacatctccacatctttcccctgcggctcctcgaacggcatacaatagccgctgtcggagtgcagaatcatttcttccgtatatttcattgtgatatatattttcgtgtttctatcttctcattcctccgctttgcgtttgttcctccggagagagtgtcggcgtctgtgtcctcgataccgtttccgagggaaccgtgcggacaacgcccgcattgttgccgataagcatcatgcccagaaacagaccggcgattttacccagccagccgaaacgtccgaacacgaggtacgctgctgcgataagtcctgcaatgttcaatcccgacacattgccccctccgaggtttcgcaaaaagccgctgagcatgttgaacaacccaccgccggaggcttcccgcaggaagttcgataccccgttcagtttcgagtccgcgcctcccacagcctcacctatggcagagaccgtctctccggctttgtctttcagttccttcatgtcttcggtcgtacctgcaagggcatccgtggcggatttgccgactacggcctcactgacgatccgtgcgacacttttgtcggtggtcagtttttcccaacccacataaccgacggcagctccggcggtagccgttttgaccgcctgcccggctccccgaagggtctgcgagggatgcagtaccgcatgaccggcacttttccccgtcgcattggcggccttgcccatgcctttcatggcctttccgccgtatttcaatatcgtatcccaagctcccatatttttattcttttttttagggtcttacatttcttccaatttgccgccagcgtctttgggcggctttcacgatgtcgtacttgtccgcgacagggcgtgcgccctcgtcgatttcccgccagatgtcgcccatcgtggtgtatttcactgccttggtcagtcgctgcagcgtccggttcatcgaccggagtttcggacgtatgccgaacacgatctccatacgttccctttccgtcatcttgttgtccgagaggcaggccgtgcgtatatcgttcacgatttccacgctgttcaatatcatctcccggtaaatctggttgcgccgcgtggagagggcgacggccaatgcacccgtcgaatgtctgctcaattgtttggtgaagtcgcccatgttgtctgtaagctgcgatatttcatggtaaaaaccgtaaatctgagccgcatagcagacaatcgagcggaacgagttcaggtaattgttgaactcccgttgcaagtccgtcgtgccttccacttcttccttcgtccacacatgccctgtagtttgcatcagcatgaccttctcttggtttttcagttccttctcggccttgttggtataaaccagaatcattcccgcaagggtcgcatcgttctgcgcctgtaccttcgagataccggcgcacagcaacagaatccatatcgagattatccgcttcatcgttcttcgttttttattatccttttttcaacgggcgatggctgccgccctgcgccagcgggacatggccagacgggccacctcgccgttgctgcggtctatcatacccgccgttatgttgttccacacgtcgttcagggtataatagcgcaggctcaaatagagcagatgcagtttccggctgaatgccgcgagctggtcgttcaaagcccacagggttttgctccgttccgcccccgtgagcatgttttccgtgccgcctttggccacggcgtcgttcagcaacgtgaacacggaaaccagctccgtcgccgtctcgatatagaggttgttcatgttcatgctggcgacgatgccctgcgggttgtccccgatggctttgcccagttttcccagcgtgaggaaaatccgcacgccgtcgttatagaggtgggtacaggctttcagcgacgaagcataaccgttcgccgtcttgaggtaactgttgtactgcttttcccactcatgtatgcggttgaactccgctgcgatactgttctgcatcagggcggtctgtgtctgccccttgatttgtttgtctatctggccgtttatcagttcgtttccctcggccaaggctgcccattccaacgggttcgaagcggcaacctgcgccttggccaattgcggaagcagaccggcaagcacaaagaccacccatatgctaatgattcgtaatctcatagattcccttttttcgtttattgatttccacacgttcacggataatcgccacgatgtcgtttccgcgccggataccgataaggtcgagcttcgggctgttccggtccgtcgaaaggataacgaccgttttcagaccgcaaagctgttgcaggaggctctggtgttcctgaaagtccacgatacggtacagttccatgtagtccaccctgcggcagaaaagtccccgctcgcagacaagctgttcgttgccgacccggtaacatatccggcgcaggcaaatgaaacgatacagcagcacgaggaacagaaacaaggcaatgaccgtcgccataccgccaagcggcataccttccatgccgccgtacaccagtcccgccatgcacatgaatatcaatggcagttcgtcgatgacgaattgcccggcgtgcgggcgcaggataatgttccggacatcttgtatggtatatggcatggtcatcggcgaaagtgtatctgtcgttcctgcccggcgttttcttctttttccgactcctgcccgacagtctcttcacgtttctgttcagccaaaagctgttcgttccagctcgtatggcgataatccggactttcccaggtaatggagacatcatgctccctgtcaataccaaggaactcccgtagtttctctcgatattcccggtagcacttgttcgtggtatctatctggtcctgcacgtcttccggggcacacaacccgctcgaacgcatcgactccgcttcttccgattcggcgtcgaaccgtatgcagatttcttgcaaaccacccttgggcaataggtaaaattctccgtctgtcaaatccccgccgtccggtatggaatcgagatagggtttcctctccggcgtttcctctatggcaaaacgtactgagcggcatatctccttttgcaaatcccatgtgagattcgaccctttccgggtattatcgaaacagatatgttgccgggcagggatggtaagatcaagtatctctctcatctgtttcccgataggcttgccgcccgttgagataaagaccgcctttctcaaatccttgttcttcgcctgatggagttggtaataggccatcgcgtcataggtactcccgaaccagtagatatgtttggcctcggcaagaggtgttccggcaggacttgcaatccacaacccttcgctctcattgctttcctcgctcttgcctttatagctatcgcatccgtccattctcatacgttcccgttcctcgaaacccacgaccgtaccgccctctttgggcaaggtcagtggaaaagcgagacaggtgtatgccgcaccgtctgcgccgtgttttgttgccaggcagaaatgacggtggaaagcattctgcgtgctgaggtcgataccccggttcttgaaatagggatagaatatctcctgcatctcatggtcttgagggttgaatctgtgcaggtcgtagtctgttatatcgaatggtcgtaggtcttgcttgaccggtacggtttgcacctcgtattcttcgaaggggatgttcagcaggcggctgcacacgaggtttaccagccggttcaggtctattccctcataatattccgcgaataacgccgggtgctccttgatgaacgaaacgacgttgtattccttctgccggggtggttggcaacagcattttccctgttgcgttatgacgaacttgtcaccccggatacgcttttcctcactgtccgtgcggataaacgaggagaggcgtagtccgaagcgtcggttctggcgatacccggcatcaagcagtacatcccggatatcgagtctttgcaaaaaatcattatgtgtcaatttcttgtcattcattgtcttctcttttcttttgttgtttcatgtagggggtactgcgttgtcatcggtggaaacgtgcttgccgttcctgttcgggttcttctcttctggccggctcttcgtgaactgattcttgcagcctgatctttgccaagagctgttcgttccagtccttatagcctttttcagcgggctcgtacacaataaggtcggtgctgtcctcgccgggagcgggaagattacggatcgcatcctctatggccatgatattttgtctcatgccctccagtgtttcctcactggccgaaccctcggcaagggctatctcgtactcgtcttggcacaccatgctcatctcctgcaaatatccgtcgccgattgtccgatagtcgagcgtaccatcttcccgatagatttctttgggacgtaaaagcgtgccgattatcctgtgaaagtcgaagggttcgagttttatttcgtagttctggttctcctcgccactgatacggaccagcagtttgtcgtctttcgtcacgttgctggtgaatgtcttgcccgcctgggtgagcgcgaagttgatggcgaagatctgtccggcacggtcctggtcgaagcagagatggtggtaagcgcgtggagtggcctttatcatggctttgaactgctgttggctcggtgccccgccggtagaaacgaacactccctttcgcagttccttgtcccatttctggttaagctggtaataagccatcgcgtcgtaggcactctcgaaccaatagatacgcttagcttccgcaagtggggtttgggcagggctggcaatccacagcccctcgctcgaattgctgccctcggccttgcctttgtagctgccgcttccgtccattcttgcacgtccccgttcctcgaagcccacgaccgtgccgtcgcctttgggcaaggtcagcggaaaagcgagattggtgtatgccgcaccgtcctcacggtgtttcgtcgccagacagaagtggcggtggaaggcgtactgggtgtagaggtcgataccccggctcttgaaataaggatagaacttcttctgtgtctcccggtcctgcgggttgaacttgtacaggtcgtagttcgcgatgtcgaacgggcggatgtcccgcttgggctgtataatccgcgttgtccggtcctcgatgggatggttcagcagccggttgcacacgaggttcaccagtcggtcgggagacatgcccgcacggtattcagcgaaaaactgcgggtgcgccttgatgaacgagatgatgttatagactttctgctgctgtgcttggaagcagcactttccctgttgcgtcacgatgaacttgtcgccacggatacgccgtccctcgctgtccagacggacatacgagggatagcgcaggccgtcgcgccggttcaggtggtagcccgcgtcaatcagcacgtcctgaatgttcagcctttgcaggaagtcgtcgtaggtaaggtctccttctctcataattgtctttatctccctcttctcatatcgttaatatcctgattcatctgtgcctcgaaattgcgtatagccacgtccctcggcgtatcgacaccgggcttgaaatacggacgcggctcgcctccgaaacgctcaccgtagaactccggaccgtgatgatgatgccgcaggccgtggacgacacccgccgtgacgaccgttcctgccgcaagggcggcgaaaatcttcacgccgagactgcgctgtgcttccggccgcatcttcatgtccacctcgctgaatattttcgaaaagattttcatgcggtggtagtcatcgaccgcaaggaatttgtcgtaatccttctggctgatctcgtggctgatgacctgcccgtcgatgacggccgtcatcttgtacttgccctctatgggggacgggtgtacggctatctcgccgacctcgacctccctgccgtgccgttcttctcggtaccagcccttgcgctcgtcaaggacggaaatatcccgtccatcgacggaagcagccgcaccatacggcatctcctgccggagctggttttccagtggggagaggatttcctgctcctgttgctgacgctgcgtcagttcctcctgtacttcggggtgcagaccaagggcgatacgttgtttgctgtcgaggtccgccatcgttaccttgtcggcaaaatccgccccgataaccccgttcaggacttccagccgcttctcgaccggttgttcctcgatggagttggaggtcaggacggccgtttcttcttccgtcaggtcatagaccagatcggcggtcaccttttcggactgtacggtcagtgtccgtgcctccttatcgacgataaggccgtgggaggcaagacattcctgccatttctcgttggaaaaatagacaggagagcttatcagttccttgtaggtacgggccggttccgtgctgcgcggacggctgaccagcggcgtgatgaccgtctgcaggttttgcaggacgtcggcctgttgtgccggttgcaccggttgtccggccttgtatttgtaatagaagccgtagccgcccgactgcaattcgcccggcttcatgcgtccgtcccaccgttcagggacaatgggcggtcccggatagaacagttggccgccgacccgccgcagatggaagccccactggtggcgtggcgtccagccgagaaacgggggcggcatacccaaccgtcccacatgcccgtattcgccgataccgatacggtagccgtgcagccccatagcgacacggccgttggcattgcgggcatggacgaagttcttgggcatataaaagtctttccctacaatgctcgtgaacacgttgtaggctttcttgttggccgagtttgttccccagtccgtcagggccaacatctgacgctcggtaaggtcgtaggtcagcagcggcgaatcgtggccctgcaccacgagccggtagcccgtgccgtcgctgaccacgtgggcctgcataccgttacgcctcaatatgtcctgcatttcgggttgcaggtccatcattcgggggttggtattctttcgtatcgccataatccgttgttaaaaagggtttccgttatgcatctccgttctccatcgccgcctccagttgctcgtccttgtagtggacgaactcggcggcggattcgttgcccgccataaggctgtgctccttgcaatagcgggcatattcctcctgccattcgggcgagaaatgattcacatagtcgagccagccgtattcgccgcgctccatcttctcgataagtacctcttcggaataatattggtgttctgccatattcgctggatgttaagatattatttgtgaactcccgccgcacggttacgctcggcgcttttcttctgttcgttccacagttcttcggtatattcctcttcgggaacatagtcgaggttgccgtcatcgtccatcacccagcagccgtacacgccgaaagtgtacttgtcccactcgcgtttgggctgttctttccatttctggctgtcgcccgaacagaagcggatgccggtcttgtcatgcaggtcgatgcccaccgtgacgggttcatcgtccacgaccagtgtcagcggttcgccgttctgcatactgtttacctccattgtaccgaggtgcattatgtcggccagcacttgcaggttgcgcccgataatcggcgtggggatatacatcacctgcttcgtttcctcgtctatctgcacgaatgccttgctgtgccgtccgtctgccgtctccacatcggcaagaatcgccttgcctgcgagcagttgtttctgttgcgcctcgtcgtagcgttccagtggcgaggattccaggacgggataaaataccacgtccgacagaccgtcatctctacggacaagggcgaagcggctgcggctttcgattagttctcccttctcgtcacggacacggaccggaagcacgggagagtgtctgccgtcgcaaatctcatcgaggacacgcatcggcaagtcctcgatcatctcctgtgtaagcccgaatcgggccagtgtcggatagggcaattcaattagttcaaatcgtactacattcatatttaattttgtattttgaattacactttgcaaagatagattcttttcattcccttgtatataatagaataatattagtgtattaagagagtttatttttatgttcagagtatgattttgcgcataaattcatactctgaatgctttttttgttgtactttggtcgaaaaaggccgtggaaacgggacatcttgggcagggctggttatatttgccgcatgagaaagaaactactggttttgatggcgggtgctgcaagtatcgcaggccccgttcaagcacaattcaatacggtctcgaccgtgccgtcccgatacagggttgaagtcgtttctgccggtagggataatgtggcgaccttgcccggaaacatgctttccgtccaagactccttaccgtcggcaggagacgccgccccggcattgcccgccgacacctgcaaacacgtatggatagagcgttaccttagcgtaagctatccgctgcaccggatgaaaatcaactcgctttatgggtatcggaaagatccttttaccggaaaaaagaagtttcacaacggaatcgacctccacgcacggggcgacgaggtgatggccatgatggcgggagtggtagtgaaagtcgggcaggacaaatcctccggcaagtatgtgaccttacggcatggagactacacggtcagctattgccacctgtcgcgtatccttacccggaaaggggctgctatcgggccgagggatgtcgtcggtattaccggttctacaggacgcagcaccggcgaacacctgcatatttcctgcaagctcgatggaaaaagtgtcgatccgttaatggtactggattacatcaagtccatacgcgaagagtgcgtggcggcactggccgaatccagagaggcccccgcattaagtcctgcgggtggaaaacacagatgattccgtttatttttgttaatcatttcacgggaatggtaaaaaaatgcctttatgcttacctttgcaaggcaaaattaaggtatgaaaggattcgttgctgttctatcgttggtgctgctggccttggtatgcaattccggggcgctgcatgttccggcggccggtgtggcggctgcgcaggaatgttgtgtccgaaatacggacaacgcctcttttcagcaattccatgacagagactctatccggcaaaaaaaggacagcgacataacaggcataatcggggaaatccccgatgtggcttgccgtgccggcgcatcggtaaaggggatgcatcttcggtacatatctgtggaaacggcccattttctccgaattttacagcggtatctcatttgccgcatgaacaacctgacctattgttgtaccctcgtgcatgactcttcccgtagcccgaactgggataatgcctgcgagcattatatcttcgggatgagacggattctgatttagcggtttgtttttttatcgtttatactgacggttacacttggctgaaaagcggggtgtggctgttcgtcgtgagtatatcttattattgaacaatcagcaaaaataaaattttcaatccgtatgaatcaaaacatttctgctgccgaaaccctgttttccgcagcgcatcccgatataaagaagattaccaatatttcggctcttattctttccctccttttttgtgcggtgggactgtgccttctgtttttctcgtcgaaagtggaagattcctcttccgcgtcaggtcctgtcctgctggtcggcggaatcgcctttctggtggccggaggtattcgcctgatgataagaaaaaggagtctgatatacgttccgaccggcagtttggtgaaaaaaggttcttgtttcttcgatgcgggcgacctctctgtattggggcggttgctggaggagaagacttttgacggcaaggcagaggtactgccgaagaaggacggcggtgtgcggatggactacatggtttcgcaggacggtaacttcgctgccgtccagttgctgaagtatgttccttacgcttacgaaccggcatcttccgtactccattatacgggagaagaggccagcgctttcgtgaatgctttgcgggtcggccgattctgattctggaagggaaacggtaacagtttccgcaatttggctcgtccggcagccggttctataaaagaacggttgccggatttgtttttattgtggactggggtttgtttctttggaaggctttcatttgcacgacaaatgtccggttcatacatgacgccatgctctggaaaagacccggttgtacggcaggttttcttgtactctgtatcgttccgaccattttttatatgttgaaggttaaagtaatgagttattatatataccgattgtttggtattggcacggctggtaaaagcttgtaattttgtacccgtttttcatttcttttaaaaactataaaaaaataacgggtaattgtgcgtatatctgttctcggactgatacttatgttcctgtttccgataactctatttgcccaacagagggtggatgtgaccggaaagacccttgtcgtttccaacaatggagaaggacaagaggtgttgccctataccaatatcttggtactcgaagccggggattccacccttgtaaaaggggtgatgagtgatgccggcgggaatttccgtcttagcttccatgcaaagaaagaatcgccttacctgctgaaagtttcttatataggtatgaagccggagtttcgtgcattaaatacaggcaagacgaaaatccatgtcggaaacattgtcttgacagaaggtcttgaactgtccgaagtggtggtcacggctcccataaaggaggtggaactggtgggcgacactaccgtcatcaatgccgatgcctaccggattcccgaaggctcgaacttggaagagctggtaaaaaagataccgggcttggaatatgacaggcaaaacaaaaccttggtttataatgggcttcccattgcggaaatcaatgttaacggggaagcgttctttgcaggaaaccatgcgctggctttggaaaatctgcccgccgatttggtaagcaggataaaagtgtatgacaagcgtagcgaaatggagaaattcatggggataaaaacaggggaagaaaactatgtgctcgacctgcaaaccaagaaggagttcaacggtacactgatgacttccgtagccgcaggcaagggtaacaacaagaaaaaagaagcggaactaatcagcaatttcttcaaaaccggcggggaaaacctgtcggtaatcgccaaaagcggcaaccgcaacatgacatccgcaaacaaagacaaccgccaagacaatgtagcggtgaacttcctgaaaaagttcggaaagaagatacaccttaacgggaatgtcatgtacagcaatgctatcaatgggaacgaggggacatcttactacgagcaatacctgaaaacggggaaccgctaccgctatgcgaccagcgaccgccacaacaccaaccgcatggcaagcaccatgctaagcatgaaatggaatatcgataagatgaccttgctgaacctttcaggcagctttagtgcgatgaaagggacaaacgggagtgacagccggcaggcgacctacaatgaaaatccagaattggatatcacagcaccgttcaatggggaagaaaacggccaaacggaaaacgatatccgggtgaatggcatccgcatgaactcccgttcaacaagcgccaaccggcagtatttcctgaacgccgacctcacccgacggctgaacgagaaaggcagcagtttggggctaaccatgcaatactcggaggggagaggaaagaacgaggcgttttccgtgtcctccaccacctattaccaattgcaggatgagtggggtaacgattccgtcctctaccgtaatcaatattatgacagcccaaacagaaaccgcaaattcagcttgggactgatactgacacagccactacacaagagcctgcgggcacaactttcgtataaattcagacgggaaaaccaaaacaacgaccgcaatacctacgacctgtcccgctttttcgacggtacggacgatgaacccttgtacaccctgccggaaggctacgaggcagcctataccgacagcctgagcaacagaagccgaagccacacgacagcgcatgaagtggccctccaccttaactatacggacagaacttgggaaatcaacgctggcctgtccgtcgttcccgaacggcagagtctcgaccagaagaccgggcggatgcaagccgacacgctgagaacctccgtgaactactacccggctgttaccgtcttgtggcacaaaaagaaaacacgggtgcaactaagttacgagggagacacgaaacagccgggactgaccgaactgctgacactgaccgacaacagcgatccgctgaacattacacggggaaatcccagcctgcgcccttcgtacaaccaaagggtgcgcttagaagcacgagacacgaagataggtttgaacggagacatgacttgggcgaacacggtgaacagtgtgacacgggctgtgacgtacaatacccaaacaggcggtatagaaagctatcccgtgaatgtgaacgggaattggaacgcaagagccaccgtgcgataccagaagcgcatcaaacgccgattttccgttaccgcacgtaccggcgcttcgttcagccagaacgtaagccttatcaacgagggacagcaggagatgccggagcgcagtacgacccacaacacgacactgaatgccaacctgcgttttggctaccagccccaatggggaggtttcgacctgacgggtgactggcgtttccgccactccaccaaccttttgcgcgaaaccggcgattacacccgcgactaccgcttgggggtgaacgcctacgccgacctgcccggcggcattcagttgcggagcgatgtcgattattctttccgcaacgggacgaacatcacccccggcgaagatgaccaggtagtgtggaacgcctccctttcttggcgtttcctcaaacagaagaaggcggaactgtcattctactgggcggacatccttagccagaaaaagaactttacccgcagcgtctcttcctccggattgtcggagagacacacgcagcagataggtagttggttcatgctctccttcaagtaccgttttaacaaacaattataaagcaggagcgaagtttatatttttttagttaatgagtggtgatttgcttctaattatataccaatttttaggtattgtgctctgagtaaactcgttataattttgcaccccgaaataataataacgaaataataaaatcacagaaagatgaaaagaaacaatttgcatgtcggtttgatggcattcgcaatgctgctgataggggcatcgtgcagcgatgacgacaacaccctctcatacagcacgggtgccgtgcagaataccgaattgaaaaccattcttgttcaaagaggctacacattcaacgaggacggcaatctgttgcttgatgatttggctaacaatacgacgacgcttgacctctccggaacgcagatttccacagacgcactggcagaactttccatgttccctaacttgactgatgtggatctgtcggacaatggttacggcccggcgttcgactttgccaaattgccggaacaaatcaccggaatagacctgacgggtaatgaaatctacgactatgataatcttgtgagtgtcgtagtggaagaaaacggtgatgaaactgtgactaacctgcacgaaattaccaaactttaccttccggaaaccgctaaagagaatatcgaagatctcgtgcgtttctaccgccaaaacaaggaagccatcaccgccggcaccattgatatgaagatgactgatgtcgacggcaatctgcaaacttataccaccctgcgcgacgtgcccgacgcaaacctgctcacttatttgcagacaaattttgccgatctgtttaacggcgaccaaatagaccttagcaaacatttgggactcgaccagaaaacaaaggaactgcttgttgctcctgctgataatgttaccaactttgagggtattcagtttctggtggagaatccttattgggaaggtgctaaaatcagcctttattctgccggagaagaaagtatagcttctatgcccaatataaaagtagggaaattcataacccaagtcatcctgcaaaatatagaagtggaagatatcgacttatccaatgctacagatttgcgaagtgcttgggtccaaaataacccggcattgcagaagttagatttgagttattccactatttggggtcaaggagataaagaaacggaaggcaatggtacgtatggcagtagtctgatggttctgggatgtcctatactgaaagaaatcaaattgcccgaaaaaaatgaattgaaagcctacagaattgatattgaatgcttggacgcattggaaacatttgacatgtcgaatgtcaagatggtagcagaactcagtataggtgatttgaataaagactttaatctggtttatccggaactgaccattttctatagtgaagatggatatgccggtacttatttcgcttgttcagagaacactttctatagagaatcaacccaagcattcctgaaagcaaattatacagacattgacccagacgatacggtcagaaggttaggttatacttcttctttatcgtatgataaaaacaaaggatgccgttggaggactttattgaacaaacaaaaataaagtgtaattatttttttattaaactttaattataaaaacgatgcgaaaatttttcttaggagctgcccttgttgcagcaagtttcggaatggcacagtctgctgacgctgccacagtgatggatgtagatggtgtaagtaccgtattggcaatcagcgattacgaaggtacttataacggtacaatggatcaaatcaaaatgagaggagaagattatgagccacgtgctgcatcttatactcttgaaaatggtattttgagttgcgattttccgcagatcggaagtatgccggggaatatcactatcgagttggaagtagaagtagatgaagaaaccggtgaaattacagctttcaaaggtgataaagcaggaactttgaccattttaggcatggatttagtaacattgaagttagattctttgactgatgccaaagttacaggcaacactatcgagtttactctggcagtatccggtaagttcttaggtgcagatttccctgcatccgtacactttgttggaacaaaataattcgtcattattttgtcaagcaacgaaattaaattcagaaagagtaaggagaaagctgtcaaacggctttctcttagctctttttttgtgtgttactaagaaaaaattatcacaatatattcacctcacccaatggggaagacaccattatcctgtcagcaaggctgctatgccgctaaaaacacttccggtatgcaaccgacggcgaggaaacaaaattatccaaaccgcctgaaccgcttctgaagcctacatgcggtacacatcaaagacagactttgccatcggaaaaagcctgcctttaatcatgtaaaaaccatgactttacataccctttgcggaatacacgcaggcaagggtaatgaacaggaaacaattatggattacaaaacaagtaaattatataagcaaaatgaaaaagttatactttttattcagccttcttatggcaacagtaatcggattaagttcgtgtgaaagtgacgattcacttaccaatgagccacctgcacaggaatatattgataaggcgaaggaaatccttgtaggagacctcgtgctctcaacccgtgctacaatgagcggtgtggacaagacgctgttggaaagcggttgccccaccaaattcaacttttcttggcgggaagacggcacgatggtgctcgacctgagcgacttcaccgtgggcgccatgcccttcgccatcaccttccgctgtgcaacgaagtttatgcaactcaacagttgggaaaaggatgaataccccggcagcggttgggtgaagttcgtgggaacggacggaaatgtcaccacgagcggcgatgacgctgcggacaaccaggaagggagcggcgcccgtgtagatggtttcctgaacgtggacaccaagcaagtggagttcatcgtggactacaacatgatgaacgtgcgcaccgaaaccttcctgcaagaaatcgacaagagccgtatcgaccgctttgaagaagaatttgcccagtacgaaaaagacttggaagaagccaagaaagaacagggcaaggcttgacctttcgattgcaggaaagaaggaaagaccgtaagacacacggctttccctcttttttgtgtagaataacatgttttgatgatagacagatgaaaagaataacagccatcttattttgtgtcttactggcatgtatgaatgcccaggcacaacgtaaagtaaagctcaaagttctggagaaagggacggaacagccggtcatcgcggccactgtggtctatgccgataacgaagcgttgcaaaacctgcaggggagcgtcacgaatgtggacgggctggcggaactgaaaatcccctccaagaaaacgtattattacaaaatatcctatgtcggttttgttccggcaacaggaaagatagaagcgaccgaaaccgagaagaccgtctatctggaagaggatcatttgggactgaacgaggtagtcgtcaccggttcgcgtacagcgcgacccatcaagatgtcgcccgttacgacgcaagtcttgggcggcaagcagttggtcgaagccggatacagcaacctgcaacaggcattgcagcaggaaactcccggtctgaatatccagaaggtgggcttcggaaacgaaatctccatgcaggggctcgacgcccgccacgtgctgttcctgatggacggcgagcgcatgacgggcgacatggccgggaatctcgactacgagcgtttcaacctgcacgccatcgaccgtatcgagattgtaaaaggagccagcagtacgctgtacggctcgcgtgccgccggtgcggtaatcaaccttatcacgaagaaaacgaccaaaccgctttccatcgacgcaggtgtgcgctacggacagatgaacgagcgcaattacaagaatccgcaaccgaaggattttttgtatatgttcgagaagaatgccgaccgccccaacctgcaaggctgggtatctgccggattcaaggcggggaaagtaacctcgcagaccgacgcatggtacagttcctcggatgcgttctacatgtatcaggcggagaatgacaagaaggtctacacgcaagaggccaatcccttccttccgcacgacatcaccgtggtcaactcgtcctcacgtccgccgatgggcatcgagggcaaggagcatatcacggtttcccaaaaactgtattacgacccgaccgatgacctctcggtcttggtttacgggagcaccttcttcatgaacacgtatgacctgatacaggacatgactttcagccaggcgcgtgactggacggcgggagccaagctgacctaccacgtgaaggactggttcagcgttacgggtagccttcatgccgacttttacgaccgcttcaagcggcacgagcgcatcgacacgcgcaacaaggactacgagagtagcatctggcagccgcgcctgaccatcacgagcaactacttcgacgggcacagcctgatcttcggtgtggaacatacgtcggacgaactgacctccgaccgtttctccggcaatgccaaccacgatctgaaaacccgcgccttgaaagaaacggagtatttcttgcaggacgagtggaccatcaaccccaagtggatggtatctgccggactgcgtaccaacttctcgaaggcgttcggtttcatggggatgcccaagattgccgccaagtattcgcccaacgaacggtggagcatccgcgccaactattcgatgggataccgttctccgagtatcaaggaactcttcttcaactgggaccatttgggcatgttcatgatccgcggaaacgagaacatgcaaccggaaaagaacaattatttctcgctgggagccgagtacagcaacgaccgcctgttcctgtccggtacggcctacggcaactatttccgtgataaaatcgagggcgtatggcgcatctacgacatgcagtacaacttcgagtacaccaatttgagcaagcaacgccttctggggctggaagccttgctgcgctggcacgtgctggactgcctgacgctgaacgggacgtacagcttcgtgaacgtgagcaagaacgagggcatacaggtgaacaccacctctccccatgccgccacggccagtctggactacaagttcacgaagaagaactaccggttgaacgccgtgttcagcgcctcgtacatgggacgcaagaagttcgacgtgcaggaccgcgtgttcgtggaagaggacaacaagagctatgacgcctacttccgttgcgacctgccgcaatacgtgctgtgcaacctgtcggtgtcgcagaccttctacaataaggtaaaactgacgctcggtgtggacaacatcttcaactacgtgccgaaaaccctcggttcgggcatcacgatgttcaacgtgcccgccacgccgggaacacgcggatgggtgcagttggaatttatgctggacgatgtgattaactctttaaggaaaaagaaatgattaaatatacgacaatgaaacgtatgggattattcaaaacggtaagcctcctgctgggctgtctcacgatgttctcctgcgtggactatgacgacatacagccctttacgggcaagacgctgccccgcaagtcgggctattccacaggggtgacgaacgactggatatacttcaacctccgcacgggagagtcattcaacacttacaccgtgaacaaggacatcaaggaaggcgaacaaatcaaccgcacggactgggatctggctttctgcggctataccatgcgtaccaattcgggtacgagcggcatcggtcagggcggtgccgccgacttgggctatggcggttacgatgactggacgagcgtttcacaactgccttccgacttggaatgggtcgttgacacggacgacgtgcgcgtcaccatgtcgcagaacgactggaaccattaccttgtggaaaacaatctggacttcgatgccaacccgtggttcgaccccaacaacggtcctgccacgaccgagaccaatgccaacccgctgctgtcgcaggccatgagcttctccgggcctccccccacatacaccccttcgttccacacgtatgtggtgcgtaccgccgacggagagaggtacttcaagatacagattatcagttggtacgatgccaacgtggaaatcggtgatgaaggcgggagaatcagttactattgcgacgaattgaaatgacggaaagtatgatgggacaattcgtgcgctttatgcgcttctgcaaccggcggtgggtgaaatggccgacagttatcgtcttcctgacggcgataacggtcgcccacttcgtcatggcagacaagtacggggacagccccaatgctcccacttgggagtttacaattacgctgcacgccgccatgctggttgctgcggcaattattatagtattctacaagaaacgtatcaaacgtaaattaatggaatatggaaaagactaacgtaacgaccactgaaacaacaaatgtaacacctcctgccgccaaacggcgctattggtggaaagccatcgcttctttcctcatggtattgtttaccatgcctttggggcacgggctgatgattatcatggagcatctgatgagcgagaccgttctgcactattcggcctttgtcatgggcgcggtaggtatggcgatggtgattgtcggcgtattcgccaaaggagatacgcgccaaacactctggggattcttcggcggtctgctcttctggacaggctgggtggaatttctcttcatgtattttgccaaccgtttcggcacgcagccggaactcgaccctgtgacgggtgaaatcgtaacccgtcccgaatatctcatactgcccgcctcgttcggtttttggatgatgattatggtaatgtacctgttcagtacaaagaacggatgcaacttcatcaactggtggcaacggttgctcttccgtggtaagaagaacgacatcgccgcccgccccatgacgcgccacacgagtatcgtcacattcatggaactgatgatgttgctgtggacttcctacctgttgctgatgttctgctacgatgatgtattcctgggcgagaatcatccggtgacactgttggtgggggtcggatgctttatcggctcgttctttatcttcgccaaacagttgcgcctttctgcgtggggggccaacatccgtatggcaatcgctaccgttatcgtgttctggacaccgattgagatccttggccgtatggatttgttgagcgagatatgggtagaccctatggggcataagacggaaatgattatcatactggcagcgttccttgtactggctgtttacctgtggtatatgggtgcgaagaaaaagaatgccgtttcccaataaagaaaaccggatatggcagcaacaaaagagagaaaaaggcactggcttaaagcgtttgtctccatcgctgtgacattggttgccatgccgctgacacacatcctggcacgtgcgctgaaagacggtacggcgggggtggaacagttctatgccggtatgggaatggggctgttcggtttgctgatggtcattatcggtgtattcataaaaggcgacgtcaaacaagcgctgttgggtttgttcggcggtatgttttactggatgggcgccatcgacttcctgtttatgtactatgccaaccgtttcggcacgcaggcgcagctcgacccggtaacgggcgagattgtcagccggccggaatacctgatacttccgtccacattcgggttctgggccatgacgatgatgctgtacctgttctgcactgccaacggctgcaatttcctgaactggtggcagcgcttgttcttcggcaagcacaagaaggaaatcgccgcacgccccatgacacgccataccagcattgtcgcttttatggaagtcattaccatgctgtggacgtgctacttggtgctgatgttctgctacgatgagcgtttttttggcgaccatcatccggtgacattgcttgtcgggatgctgggcttcatcggttcgctgttcatgttcgccaagctgttgcgttatgcttcgtggggcatgagcctgcgtttcggtttcgccaccgtaattatcttctggatcgcggtagaggtcttcgaccggattcacctgctgaacgggctatgggcaaatccacaaggacatgtgcaggaaatcgcgttgattctggtttcgtttgcagtaaccgggctttatctcgcttgtgacagacgaaagaaaactgcggatgtaaaacgacaataaaagataaatcatgaaacggataacttggaggaaacatcataaatggttcgggttgctgttctgcttcttcatgctcatgttctgttggagcggtattgtgctgaatcatcgtgaagcggtggccgacatcaacgtcagccggaagtggctgcctgcgggttatcgtttcgaagcatggaacggcgggctgctgaggggaacgctgcgctatacggacaaggattccgtggctcatatactggcctatggtgcagccggggtatggcgcacggacactgccgcctcggcttttgcggacttcaacgaaggactttcccaaggggcggactaccgtagcatgaaaggcatagtgcaaacacccgacggtacgctgtatgccgccggccagttcggcctgtaccgccacgacggaacggcttggatagaaatccccctgcctttggacgagggagaacgtctttcggacatcaccgtccggggcgacacgctggtagttgccggacgttcgtacctctatctctccacgtcttctcacgccggatttcggaaaatacaggtgaaagttcccgacggttacgagccgaaggtgacgcttttccgcacggtgtggatgttgcatagcggggagttgttcggcacggcaggcaagctggttgtggatgcggtggctgttgtgctggttctcctgtgcctcacggggcttgcctactggctgctgcccaaggacatgcgccgccgccaccgccacgggcggcacacggaaggcgaagcccgatggacacgcctctccctgctgtggcacgacaagctgggacgcaccactatcatactgaccctcttggtggccgttacgggctggtgtctccgtccacccgtcatgataccgttggctctgactaagacacccgctctgcccggcacatccttagacagccctaatccttggcacgacaagctgcgcatggtgcgctatgacgatatgtgcggtgactggctgctctccacttccgaaggtttttattcgctggcttcaccggatgccgttcccgtgaaggtggaggaagctcccccggtcagtgtcatggggctgaatgtctggcaaaaggataagcaggggaactggctggccggttcgttcagcggcctgttcgtttgggacagacagcagggctgggtaacggactacttcacgggagaagaagccgaagatacagccggtcctcctttcggcaagtttgccgtttcgggttacagtgcggatttcaagggaaaggaatgcgtggtggaatattacgagggaacggatgcacttgcccagcccggcgaactctccacacaacccatgtcgctttggaacttcgctttggaagtacacagcggacgggtgttcataggcagcgtggctacttacgtgtttgtcttcctcgtgggaggaggatgcgtatggtgtctgtggacaggatatagggtgagaaaaggaaacaagtaatgaaacttgtttttaagaaagtctcttggagattgagcacacccggttctacacaaaatgcgatggcatacggcagaacgccctgtttattttcatgcaggaccggagagataaaacggcatttgaaagaaacggattgccagttgaaaatttgggaggctttgttcaagattccattggttggaatgaccgcatacggagacatcgcctctttgcgcataaaaagtgaggttgtgccggtttgaagtgaacaacctcactttttataatttggggcagcgattgtttaacatcctccgcaacatccgcctcttctgtgtttcttgtgatgacgatgataatcgcagcaacgaccttcatgatcacaatctacgcaacttctgcattcttcattcttgcgacaacctctgcattccgagcagtccgtatcgcatttacacttgcggcaggtacagtcctcgcaacaacattctattttcactgtttccttttcttttttgtccttttgtgcaaacagggtcacacagcaggctgaaaaaacgaggacacaagtcaatacgattttcttcataaattataatgttttaatgtaatgactaaaaatacttgtccctattattcttggtttttcgggaaaattaaaattacgtttccaaaaatagagatataattcaataatcacaaatcacttataataaatgatgtgaaaaatgagattccattcaaaatatgaattaagagaaatctttccgcaagtacaccatgtcggtaagcagctttccatcctcataaatcggatgatcgtaattatccgtgaagaaatttttcagtcggtgtgagatacgaaagccgcaatgttcgtagaaagagagtgtagatggcgtatctcccgtaccgacaagcatgacggaacatctgccctgatagtatccaaagagataatcaaccagccgttttccgtatcctttgcgttgggaggagggacaaacggctatgttttttatttcgtaaataccctctccttcacacgtcactacagagatagccttcagaccgtcatcatagagggcaaacatctcacctcgttccagatatttgtctatcatgctttcttgttcatctgccaacaacagcaaatccaagaattgtttcttgttagaagtaataagttttatttccatgtcatatattctttttccaatgttccaaaaccgtttccaagtgttcaagtcccctttctaccaccccttgataaaaaggataaggctttttcccgatgatgttcaaacgaatttcaacaatagtcattctttcatttcgtcagttccttgattttgttcacgatgcagccaccccacacgtgcgcctttatcagaagcagaggcggccgggtaacggtttttccatagaagatggccgccaccaccttgccgccgcacctttctatctcctccttgtagtcggccatactctgtccgcttgtcagcacgtcgtccacgatgataatctgtttcccttcgatattccccgtgatacggtagttcctttcgaggatacggttttcgccgcctttcgcctcgtgcaagctgtcgcgtgactcgaacacatcgacatcatataagcccgaacttaggtccggccggtgggttgtgatgtaccagtcgagccgtttgaatcgccgggcatacttgaactcgtcgctgcacggcataaacaggatgtggtaaggggcatcggccaaattcaagacggacatgcacgccttaaaaaactcgataccgtgattttcgccctctttgaactggtagagggaacagcagaacgcccgctgttcatcgtcgatcaggtcggcgtaccgtgaaggatagtaatacccatagaaagcgacttttattccgtgcgatttgaacggcttgagcggctgatggtcctcgaaaaagtccgaacgggcgaaacagaacatgaggcaggcttcccgatggcccgccagtaccgccagacggcaataacggtcgcgctctttggcggtagcggctgctcgtgctgctgcgaacgcagcagctgcagtcttccgtcgccagaaaccggcaagatacgacagcaggactgcaaggccgcacaaaaccatgaaccagagctttgcttccatattcattgggataaggttattccgacatacctgtacaaccggcagttttctctgccacgggagctttgcacctgccgttcacctgtttcaatgtcttctcgaaatatcttgttttcatgtatttatgcaatttattactgtgtaatatataagcaaaggaatgaattacattttgtctgctgacattcctaatattttttccatattgggacgaaagaaattgccccactcttccagtttctcaatgataggcaaaagggtttcacctatcggagtaatcgagtattcggaatgtgggggaagttccgcaaatattttcttctctatgattccatacatttccaatttctttaattgctgatttataacacgagcattggcttcaggaaacaatttgtgtaatttgctcggacatttagccccatcgcttagctcaaaaatgatacaacttttccatgtcccactaataacttccattgcaattctgattccgtaatcaatgtcaaaaggtattttcgatacccgattctaatttatattccacctcccagtgcatgataaagtttgataatactctgtatgcggtcaaagctggtttgcaaccggtttgtctctgcttcaaggagtgactgttgggtagttaatatttccagataggtggtaccggaatggcgcatcaacagttccgtctttcgcacagcttcacgcaaggtttcaacctgatgggtgtttatttcaaattgcgattttgccgtctgccatgcggttaaggcatcattcacctctttccccgcgttcagtaatgactgttggtataacaatctggcttcttcctgacgggtttgagcaattttcaaattagcgatatttgttccacggttgaataacggctgtgtcagcgaagcgattgcattgaacagccactgtccgggattggtgattaccccgcctccattgttggtccagcccaatgtacccgaaagagtgatattggggtagaaggccgagcgggctacattggtggcgtagaacgcttgagccagttccatttcagcccgacgaacatcaggacgattggataataacagcaaaggaactccgacagagattgtatcggggaaagacgcttctgccaaatcgctccgctcaatcgagtgcgacggcatggcaagtatcgccgacaaggcgttttctgtctcagagatacttttgcatatagcctgttgcgatgattccagctgcatcacgtttgcccttgcctgcaacacaccggcatcattcgccttgcccacctttttcaacgcttcaagtgtgcgcacggtagcctgccagttttccaaagtccgatgatttatcaccttttgcgcatcaagcagggcgagggtatagtaactgtccgctatcgtagcgacaagctgtgtctgtacggcctgccggtagtcacgacttccttgcaatgcggcaaccgcaccacgctttgctgccgtaagtttgccgaataattcaagctcccaacttgcggacgctcccacattgtacgcctttgccgtagctccgtcatatttgtttccactgccttccgcactgattcccaatgaagggaggtacgacagtctggctgtcatcagggcggcttctgccgcttccactcgcaggcgtgccacattgaggtcggtattctgccggagtcctgtctcaatcaaaaactgaagtttacggtcggtaaacatctcccgccatgacatggatgcaagcgttgttgtatcaatgccagccgggatgttccggtacagcttctctgtcggaatgtcagcccgatgataccggctgtatgtgccacagccggtaagcatcaaggttgatatggtaaataagatgatcttcttcatttaattacgtttaatccgttcttgaatatattgaaatgtgatgaacagtgacggtacgaggaacagcagtgccagcgtacctactatcatacctccgattacgcccgtggcgagcgagcggctgccgttggcacccacaccatgagccatcatcagcggaacgagtccgaacaccatagacaatacggtcatcaggatggggcgcaggcgaacctttgccgcactgtatgccgcctgcgcgagggtcatgccttccgaccgccgcttgccggcatattcggtcagcagaatggctgtcttggcaagcagcccgataatcataatcagtccggtctgcatgtagatgttgttctccagcccgaacagtcccgcgaacaggaagctgcccatcaaaccgcaaggcacggacagcaacacggcaaacgggatgaacacgctttcatagagggcacacagtatgaggtatatcaagaccatgcacagcacgaatatccacacggcattgttcgtcgtattgctttcttcgcgcgacaaccctcccaactcgtaggtgtaacctgacgggagaacgtggtcggcagtttcccttatggccttcaatacctgtcccgaactgtatcctgttgccggcgacccgctgatggaaatggcattgaacatattgaagcgggtcaggtccgacggaccgttggtcttggtaagacggacaaaatggctcaacggcgacatggagccgtcggaagtacggacatacatgccgtccaacgattcggtgtccatgcgatattcggcaggagcctgcatggtgacatggtacagttttgagaagcggttgaaattcgatacatattctcccgaaaaatatcccgagagtgttgacaggacatcggaaggagacacaccggactgttcgcatttggcagcatctatatccacccagtattgcggataatcagccgcgaacgatgaatagacctcaccgatctccggtctgcccgacaacgcttccacaaaccggtcggtcacttggctgaaggcggttatgtctccggcgtttttgtcctgcaagtacagttcaaaaccgttgcccatcccatatccggcaatcatcgggggcgacatggcgaatacggtggcatcgggaatatcggcggtggcggcataaatacggcctattacatcgttcaccgactgcccttcccctttgcgctcgtcccaatccgtgagagtgagaaaagacatggcctgcgaaggtcccgagccactgaaagaaaagcctgccacagtaccgttgtattcaatctctgcgatactgtcaagacggctgtttatacgttttagggttttgccggtctgcgccatggatgtaccgggtttcgtgttcatgctgaccatgaccgtgcctgtatcttcttcaggaataagtccggtcttggtcgtattgacaaaaagcaccaacagcccgaacgataccgcgatagtgccccacagcagccacctgcgatgaatgacatatagcacaccgcgcacataacgacggctcaaacggtcaaaaaccgcattgaatgccttgcggaagcgtgccgcgaagttgttcttcgtgttcccgtgctcgtcaatgtaaggcttcagcagcagggcgcacaatgccggagaaagggtgaaggcattgatggccgaaatgcccacggcaaccgccatcgtgataccgaactgcgtatagaacgcccctgaagtaccgcccatcatgcccacagggaagaacaccgccatgaaaataagggtggaggtcagaatggccgacgacacgcccttcatggcatcatcggcggcaagcaccggagactgatacccctcgtcgaacttcgcctgcacggcttccaccaccacgatggcatcgtccaccaccgtgcctatggcaagcacaagggcgaaaagcgtaagcaggttgatggaaaagcctatcagtgacattacggcaaacgttccgatgatggacacgaagatagaaatcgtgggaatcagcgtggacttgatgtcctgtaagaacacatacaccaccacgatgactaaaagtatcgcctcgataagcgtcctgatgacagaatggatggaggcattcaggaacttgttggtgtcggtaagcaccacaaactctgccccttcgggcaaatcgcggctgaggtcatcgagtacctcgtgtatctcattgatggtgcttgatgcgttcgaaccggatttctggtttatcatcatcatggctgccggatgtccgttcacttcggatgaataattgtaatactcatcgcccagctctatatccgcgacctctttcaatcgcaatacatcgccgccgggcagggacttgaccaccagttcgccgaactcttccgcagtcgagagcctgccccggtatttcatcgtgtactcgtttgccccgtcggagttctgtccgaaagaaccggtggcggcctcaatgttctgccgtgccaataccgccgaaatatcatccgggataagcccgtaccccgccatcttgtccggtttgagccacaaacgcatactgtagttcgagccgaacagctgtgcctttccgacaccgcctatacgtttcacccgtggctcgacattgattttcatgtaattgttcaggaaagtctggtcgaaacggtcgtcgggtgagtaaagcgcgaaagtcatcagctcggcattctgctgtttctctgtcgtgacgccgcttttggtggcttccgccggaagctggcttaacgcgccattcacacggttctgcacgttcaccgccgccatgtccgcgttggcaccctgcttgaaatagatgttgatggaagcatcgcccgtgttggatgcggtagaggtcatgtagatcatgtcctccactccgttaatggcttcctcaagcgggacgattaccgctttctgcacggtttcggcattcgcaccgggataggtacagaacacgttgacagtaggcggtgcaatgtcgggatattgctccaccgggagcactttgatggcgatgagtcccatcaagacaatcaccacggaaataacgcccgagaataccgggcggtctatgaaaaatcgtagattcatggggttacgtttttaggtgtaacaatcattccttcctttacaagtcctaccccttcggtgatgatggtgtcgcccacggacacaccttgcttcaccacgaagtggttaccatcgttcagacggtccacggtcaggtaggctgcttcggcctttccgtttctgaggcggtaggcgataatcttgtcctgcaattccacggtggcggtcttgggcagcaggatggcatccgcatccactccttgcaggacgatattgccgatggtgccgctcagcagctcacggtcggggttggggaagcgggctttgatttgcaccgccccggtggtggcattgaccacgccactgacagtctctatgcgtcccttccgtccgtagaacgtgccgtcattcagttgcaggccgacttccggcatttgggaaatcatcttgtctatggaaccgtattgtgtcctgaactgacgcagcttgttttcggagacggagaaataggcgtacatttccgcattgtcggaaactaccgtgaagggctgcgtcatgccgggactgacaagtgcgccgatgcggaaaggaagcgtgcctaccactccgttgctgggactttttatctcggtataggagagattgttgcgggcatccgtttcctgagcctttgcctgttcgagttcggcaagtgctaccgccagcccgttgcgggcaagagagagttcgtaatcggatatgactttctcatcaaacaaggcttgcttgccttgcagctcgatccgtgccgtttccacttttgcctgtgctgcgctgacgtttgcctgtgcggtgcgcaaggctgcctgatagggcacttggtcgatgacggcaagcacttgtcccgtcttaacctgctccccttctttcacacacaggcgggtgatacggcccgacacttggggtactatgtccacatcctgccgcccacggatggaggcggaataactttcttgaaattcaactgcccgggaagaaaccaccatgacgggcaatgtctgtctcatttcctgttccctctgttcttgtttgcaggctgtcaataatgcagccagcaggcttgttaccgtgatgccggctatccatgttcttctattcatcatctgttcttattgtttttccattccttattcaataccgcataaatgcaggtgtcctcataccgtggtgttccatcgggatggcacacaaacgatatgaattccttcatgcatccttcatatctcattccgagacgttcgcacaatcttttcgaccgcaggttgtcatcctccacaaagccgtagatgcgacgtgcgcctgcttcacggaaaaggtaatccagaaattccgttgccgcttcatgcgccaatcccttgccctcgaagcgttggttgaaatgccagcccacgttgaatgtgtcggcttcttcacgcaatgcaaaaacatcaccgattatgaaatcgtcttccttcaggcacacggcatagcgcagcaactcctttggagtattggatatataagccagtgcagactcttcagagcacaagcgttcgctcacgaagcagttgacacgcggatgggagaggtattccagcaaaccaacggcatccttctcctgaaaatctctgatgataaggtgttctgtttcaataatcataagtcgccaattttggctgcaaagatattccatacccaatttgccgacaaccggcatgcagtcgaaacggaaaaaaacatttataaaacagctaaaatggcttctgaaatgtcattgtaaatgctcttttcaaagatgcacatctttgggcagttaagccatgcttcttgatgcgtcaccttcctacagattaccaaaatcataccctgttttggcaatctacgttcattatgcaagcatcgaatacagtataaatgatagaaccatctgtctcgacactccttttatctgtttcaactgctgttttgtctgtttcatccggtttcgacctatcaaatgaaaaagcaaagtcgtacctttgcaacatgaagtaactttgcaaccaaatatgatcaaagaaaatgtaaaaataatgaactggcggaacggcttcctgctatcgctcgtttcctatatcctctaccttattatatggttaattcttgatgacgaaaccgccaaccaattaccgggaatggcgacagtcgattatgtcgtcgattttttgttgtgtatgctctttacctacatatccttggggttctcttaccttgtttttaagattttgccgttcagaacatcttatgtgtgggtgattgtctatgcttcctgtcttttgacgctgaataacctcgttacgttcggcatgacatctctgttcaatcttttgtgggatgaaaccggcaacgggcttcttgacgaactgatcaacatgaagggggcttacacttttgccatgatagccactttcatatcaagcgtttatgccaacacattctacctccagtcatacatcagggcgcgcgatgagaagcaggctcttgaaatggcactgatgaaggagaaggagattgccttacagtcgcaactcaactcgctgaagctgcaaattaatccgcacttcatgttcaacaacttcaacaacctgctggaattgatagaggaagataccaaacttgccggcaagttcctgagtaacctgtcgaaagtgtaccggtacatcatcaccaatctggaccggaatctgattcccgtcagagatgagataaagttccttgaatcatacttgtatctgatgcaggtgcgccacgtcggaggggtcgtcacgaacatcagcctcgaactgaaagaatgcaaaggataccttcccccggccgtgttgcaacttcttgtggagaatgcaataaagcataacggtttttcgatggaaaatccgttgtttattgacatcacgttgtctgacgactatatcacagtgcgcaaccttaaatctcccttgctctcaaaaatggaatcgaccggcttgggtcataaaaacataatagagcgttattcgttgctctgcgataaaaaagtcaagatagaaaatgccgagaacttctattcggtgagtttgcccatcataaaaaaacagtccctatgaagatactgattcttgaagacgaacagcgcaatgccatgcgtctcattagattgctgaacgacattgatacgacgtttataattgaaggaccacttacaaatatcaaagaggcggtcgattttttccaatcaggcaaaacaacagacctcatccttgcggatatccgccttactgacggcctgagttttgaagcgcttaaatatgctccggcaaccgttccaatcatattcaccaccgcatacgatgaatatgcggtacaggctttcaagttcaatagctttgactatcttctgaagcctttggatgccgatgaacttgaagctgccatagataaagctaccaaagctggcaagaattatgctgacgaaaatctccggcagcttttcgattcgttgcagaagaaccagttccgctatcgggaacgtttcctgttgccctatcgtgacgggtataagaccgtacgtgtttcggacatcaaccatatcgaaaccgaaaacaagacggtataccttcgtcttaataatggaacttcagaagttgtcaatatgtcaatggacgaactcgaacagcaactcaatcctgattgcttcttccgtgccaaccgccaatacataattaacatagaatacgtattgtttctttctaattatttcggagggaaacttattgtccgcttaaaagggtatccgaacacaaaaataaccgttagtaaagagaaggctcaacggctaaaagagtggattgacaaatagtctctgccatgctatgataacatttctgtactcactttcagttagaaaaaactgaatatctcgctactccatgaggaacgcgcggatattctttataatcgcttgttccagttcgtattcggaatgttctttcgaaaggcccacaaggtcgaatgtatattcgtctttcagggcaagtatggcctggttctttatcttctccggcaaggtcatgtcgaagttgctctgaccgagcagataattttcgtaggtctttgcttctatcttgttgataagtacatctttcgtccagccgtatttcttggttgacaagatgtagaattgccgttgttgcatctctttgcacttggtcagaatgacgatgtgcttcgaccagctaatttctccaactaacggttggagaatttcattcgaccggtattcggtataaaaacgggccatgtcccacatgttggaaacaccgaatccctttatacccagaaactccttttgtatgtaccgcgaaaggttctccatgacggattttccccagcccaaggccgcttgttgttcggtaatccgcctgccgatttcccaatacagggcgatcatctctttgtttacggccttcaatgcctcgtattggggcgaccggatgcgggaggttatctcgtttctgaaatcgagatattcgggagataagatgggagtattcttttcagtcataggttattcattataatcggttacaggggtaagtttttcttttgattatgcacaggattcccttgtcttatcccatcttctccggatttccggtctgtcggcagcattccccgttgtacgacgctttctcccttttctatacccgttccgtcctttctcccttgtacgcattttcctccctcttttagctgtcggtttccgtgcccagccttgcagcgacctgcggggtattatttttccgcgaaggtaacgggccgttccaatcttgccaatgccggctgcgccgcgagtgaggcgcaaaaatcttcctctccgttgtcgagcgtattttttcgcttcagccttgtccgattgtccctgccaccttcaagaggcagaaaaataatcccggaggccgcaaacaggccgaataaagggaaacaaacaaggttaaattatgagttacagcaaattaaaatcactggtggcaaacgtggaagccattgcaacggcaatgaaagtccgtatcgacgaccgacaagccactgacgaagagaaagaggtattatcccgatattccggtttcggggggattaaagatgtattgaatataggaacggagcataccgtcagcgatgatgtggccgagcctatccgcaagctgcaggacttgataggcgcatatccctattatgacgacgccatgcggcaagccgtcatcaacagtataaaatcctccgtcctgactgctttttacacaccgaaattcctcgtggacgcagtaacccggcagatacacgctacattcaaggataactgcctgcaaatgagtacctttcttgaacccagtgcgggaattggcggctttctgcccgtctccatgcccggcactcgcagctacgcttttgaaaaagattgtcttacggggcttatcctgtcgcttctgtatgacgaggcgaccacggtaacggcaggcttcgagacgatagccgaccagcatctggagcatgagagcttcgatgttatcgcctcgaatatcccgttcggcaatttccgggtgttcgatgcggaaatgtggaagaaaggcggcatgtacgaacagtcagccaagaccatacacaactacttttttgtcaaggcaatggaactgttgaacgagggcggactgctggcgttcgttgcgccgagaggaattgccgacacgccgggcaacaagttcgtgcgcgagtacctcgtcaatcatgccgacctcataacggccttacggctacccgatacccttttcatgcagacgagcggcatagaggtagggagcgaccttttgatattccaaaagcacagccgcaaggcgacgctctcgttacgggagaagatgtttttgcaggtctccaaggaaaaggtcgacacggcaggaacgatgaccgactatgcgaacaaaatctttaccctccccaagaccgcccttgccacggacagtcgcattgcgctgaaccagttcggtaagtacgtccgcaaataccagtggttaggcgatggaaacgccatgtcccaatacctttccgcactgctcaaatacgatttcgaccgctattttcgcaaggctctttttgccaatcacggccaggacaacacccccgtgcagatgtctcttttcggcgagccgcagacggtcaaaggcatacgtgcctacacggaggacatggaaacatggatgaagaacggcgcaatggtcgttttcgaggggcaggtaggtacgcttcggtttcgtaagtcgagccgttacacggagacagccgttgatttcgtacccgtggacgagggcaaggtaaatacggacagggccgccgactatttccccatacgcaaggtgtatttcgagctgtccggcagggaacgggaagaacaaaaggagtgctcggaactgcgtaaacaactcaacaccctatacgacgcttttattgccaaatggggatttttccacgacaacgacaacaaggagtttatcttgctcgacagcctcggtacggaggtgttcacgatagaaatgcaggtcggcagggacatcttcaaagccgacgttatgcgtgaacctgtagctttcaagaagatagacaccgccgtaacgctgtcccccgtggaagccttggcaagcagcctgaacttttacggcaaggtcgatatgggctacatggcacaagccacgaacaaggaggaagaagaaatcatcgaagccctgcaaggggaaattttctacaatccggccaatggggaatgggagcacaaaggaaagttcctctccggaaacatcatcgccaagcaggaagagacgctttcctttctcccgaatctcgcaggcaaggagaaagaatgggccgaagcgtccgcaaaggcactggagaacaccatacccgaaccgataccctatgaagaactcgacatcaacatgggcgagcggtggatagatacgaagctgtacgccgatttcgcctccgacctattcggagtgggtgcggacgtgatgtatttcgacgtgaacgatacctacttgattcggctgcagggatattcgcccgtggcatacaatacctattccgtgcgcaattacaacggcgaggacttgtttgtacacgccctgcacgataccgtacctgagataacgaaagaggaataccggaacggcagcaaaatacgtgtgccggacgaggaagccatgcaggaggccgccgccaagatacaggaaattagagaccgtttcaaccggtggcttgacgatgagcctttggaagtccgggacgaactggtaaggacatacaacgagcgcttcaattgttacgtgcgtccgcactacgacggctcggcgcagacgttccccggcctctctttcgagctgttcccgtacaaagaactttatccctcacagaaagacgctatctggatgattaagcagaacggcggcggtatctgctggcacgaggtcggcacgggcaagacgatgattatgtgcgtggccgcatacgaaatgaaacgtctcggactggtgcagaaacccctcattatcgggctgaaagccaatgtacacgagattgccgatacattccgaaaggcataccccacggccaaggtgctctatccgggcaaggaagatttcacccccgccaaccgcaaggaagtgttttcaaaaatcaagaacaacaactgggattgcattatcctgacacacgaccagtttagcaagattccgcaatccgaagaaaccatgtacgacatattctcggaagaactggccgatgtggagcgcagcctcgaagtgctggagcaatccactatgcgttaccggagcggcaggatgcagaaaggactggaaacccggaaacagaaccttgaagccaagctcgccgaactgcagatgaagatagacctccggaaagacgataccatcgatttccgttcgatgggcatagaccacatttttgtagacgaatgccactgctataaaaatttgatgttccagacacgccacacgagagtagcgggcatcggcaatgcgcaaggctcgcaaagggcgatgaaccttttgtttgccattcgggacattcaacgccgcacgggaaaggacttgggggctacgttcctgtcgggtacggtggtcgtcaatgcgctgaccgaactgtacgtgatgttcaaatatctgcgtccaagggaactcaaacggcaacaagtaagctgtttcgacgcttgggcggctatcttcacgaaaaaggccgccgactacgagctgaacgtaacgggtacgataaagcgcaaagagcgtttccgcacttacatcaaagtgccggaactggcgatgttcctgcgggagattaccgactatcgtacagccgatatgataaacctcgatgtgccggacaaaaacgtgcgtttcctttcccatgcacccactatccaacaggaggaaatgatcgggcggctcgtcgcctttgcgcacagcggacaatgggaagatttggggttggatattccgcagccggacaatctcgacaaggcaaaaatgcttgttgctaccaacgtggcccgtaagatgtctcttgatatgcgtctgttgggcgataagtttactgatgacccgaacaacaaggcttcgatttgcgcaagaactatttatgattattatgtaagttcaaatgccaatcgtggtacacagttcgtcttcagcgaccttgccacttacaagccgaacgagtggaacatctatagcgacatcaaggacaagctggtggcaatggggattcctgccgatgaaatccagtttatccagtacgccaagaccgaacgggcgagaaagaaactttttgcggacatgaacagtggcagggtacgggtgttgttcggctctacctcgatgttgggaacgggagtaaacgcccaagaaagggccgttgcggtgcatcatctggagataccttgggtgcgacatgaagtcgcatagataattgttggaatgatacttacgggtatcagctttaacccgctgttccgtcagcggtagcctaccaccgatgcaccttaatagttgtattaagcggttgggacaaagtacactttcgcaagacaagacagaaccgtgaggggaagtcaagtacggttagtatcataccgtagagtggcgaggcaggatagtatggttagcgcaagcgaactgttagtaaacttcgtaatgtcacgaaagagtgtaagatactggtacactctacccaaaagggaagcggtcggttaatcctttccatggtaggattacacggatataagcaccgccggaggatgagacagaacctaacctatccgttagttatctatgtggaacatggtaagcctgtatatctcctgccatgtaaaaatggcaggtaagctgacagcaatgaaagccgaatggtgtgcaggtataagataacagaaaaagcgaatgccgttctgtaatggaacggatacggattgaaccgacatcacgggctgatgtaggcgacatcatccgacacgaaagtgggcagacttctgtggcgacactcggtaggcaaaacaaaccgaatgttgccaaatggtgattctttacaatagacttttagaacttttttaaagtaggaatgcaaatgaacgataaaatcaaagaaaaactcctcgaccaatcgtgtgcaccgactgataacttgcaaacgaattgggacaggatagactggaccaaagcggagcaggctgttaagaagcttcaagctcgcattgtaaaggctcagaaggaaggcagaacgggcaaggtgaaagccttgcagtggacgctgacccactctttttacgcaaaagccttagccgtaaagagagttacttctaacggaggtggtagcacccccggggtggacatggaaacatgggagaaacccgaagcaaaaacacaagcgataagtgagctcaaacgcagaggctacctgccgaagccattgagaagagtccacatcaaaaagagtaatggcaaactgcgaccgttgggaataccgacaatgaaagacagagccatgcaagcactttacctcatggcattggaaccagtgtcggaaacaacagccgacacacgttcgtacggtttccgcaaggaacgtcgctgtatggatgcggtacagcaatgtcataacattctccggaaaggctattctcccgaatggattttggagggtgacataaaggggtgcttcgaccatatcagccatgaatggttgcttgccaacatccctatggacaaagcaatactccgaaaatggttgaaatgcggctatatcttcaacaaacagatgttcccgacagaggagggaacgccacaaggtggcattatctctcccacgcttgccaatatgacattggacggattgcagaaagtccttgcagagaaatataaacgagttagaataaaaggcaagttatattcgccaatggtgaatcttgtccgctatgctgatgactttataattacctgcgagaaccgtgaaacacttgaaaaagaaatcaagccattggtagccgactttatgtctgaaagaggtttgaccttatccgaagaaaagacggtgataaccaacattcgtgacggtttcgatttcctcggtttcaatattcgcaaatacggcaatgaaatattgacaaagccgaccaagaaagccgaaaaacgctttatggaaaatatccgtaaggttacaaaaggtcataagggttgcaagcaggaatcattaatcagaatgttgaatgctaaaatccgaggatggggagcatattatcagcatggggcgacacgtgattcttttcacagaatcgaccatcagatatttctcgccttgtggcaatgggctaaacgccgccattccaagaaaggaaaacggtggataaaagaccgttattggcacaatatccgagggaacagctggacttttgcggctaagttcaagaaatcaaacggcaaggaagaccaactcactttgctgaaactggcatcttcgtttcctttcctgcaatatacgcagataaaaggggatatgaatccgtttgacgcagactgccgcctgtacttcaataaaagaatgaagtcaaagatgcttgtgacactgaaaggacgtaagtccctgctttacctatgggaaaagcaagggcggaaatgtccgatatgtggtgaaccgattgacacgtataaggcatggaacgtaatgccaaccgtccaagacggacggaaatgcaatctgttggttcatgatgaatgtttcaaattatcccgtaaaaacaatggaaacaagaagtaggatgagccggtctctgcacacgaacagagactttgaaaagcttgagccgtatgaggggaaaccctcacgtacggttctgaggggggaagagggcagtaatgcccttgacctacccgatcgccccgccgacatggagcagcgcaacggtcgtgcggtacgcaaaggcaacaccgttaagctctggggaaacaataccgtggacgtggtgatttacggaacggaaaagacgctcgacgcttacaaatttaacctgttgaaaaccaagcaaatgttcatcaaccaaattaacaacggtacgattgctgtgcgccgtatcgacgaggacgctatggacgaggataacggcatgaatttcgccgagttcgtggctctcctgtcgggaaataccgacctgttggagaaaacgaagctcgacaataagattatgcagctcgaaaaggaacaggccattttcaagaaagaccgtatcagggccgagcgtaagattgcggccaaccgggaagacatgacaaaggccgagagtgcggcggcacgcatgacgcaggactgggaatatatcacctcttacaccggagaccggacgacccggctgttgaacctcgcacaagccacggcggaagagaccggacgggagctgcaccgcatttccaagacctaccgcaacggggcaatcggtacgataggcacgtatgccggattgaacctgtcggtgtacagcgagtatgacatgggcggtacattctaccgcaacacgttcctcgtcgagggcgtaagcggactgaaataccgttgtggcatatcgggagcattgcctctgggcttcgtggaatcctcccgatacccgcaagccgccctcgccaagctgcccggcatgattgaggaacaacggcagaagatagccaagctggagagcgagatacccgctttgcagggaatcatcgcccgcaagtggagcaaggcggacgagttggcaaggctcaaacaggagtgcaacgctttacagcatcggatcgacgaaagcatgaaagaggcggaacgcacgcagtccgccctttccgaacacgaggccaccgacaaagcggcatgaccataattcatagatttaaccttttccctctgttcggttacaacaccggacaggggattttttcaccttccggtctgccacggccatacccggttgtaacggaatcttccccttgtacctccagccactccttttataccacacaccttgtcttttataggcaggctttcgcttcccccccctttgtagattgagatgctatcacgaaccgacgaccgtaaagcccgacacttttttccgcaaagttgattgcatctcaaaactttgcctcaaggcccatcttcgattttcctgatgaaaaatcttccttctcattccattccaagagtatttttcatggaatccttgctgcaaaccccgtgatgcaaagacgaggcagaaaaaagaatcgaactttccggtaatcgctcgaaccggagggaaataaaaaaaacttaaaaacaaattgaaacatgaaaaaaaattcgctttttgacaactggttcgtttacaactatcagagattgcgtaacatattcggacgttacctgcacgaggacgcctttcacgacgcctatttggcgatgaaacgggaagtcgtgatttcggaaatacctgtcgagagcttcgagccttattttttcggcgtgtacaaaaagtgcagactgaaatgtattcacaaggatagttgttactgtttccccgacaacgaacatttctttttgctcatgcaggaagaagaaacaccgtccgtcgaggtgctggcagcttccgacaagctggtgtatgacatactgctgtttgtgaagaagaaatatccccaaacggactacgagcttttcagactgaaagagtacgaggcgaaatgttcatacagacacctttccgcctatgcaggcatttccgcaagtgcgatacaccggagaataagcgatataaccgacactatccgcaatcacgaaggattttccaaaaggtacgcccacgtaagcatgtaatttgtataacccgtaaataattcaagaaaatgaaatttgtaatttacaacgtcgagaattgccggacaagagaaaaccgtgtaggtaaaagaagcataaggttcaacagcgttaccggcaacatgtatctatccaccaaattggcaaaagaaatgaatatcacaatgaacgaccgactggagtttggctgtgatgaaaacaacccgaaagagtggtttctgcacaaaaccactgacaagcgaggttttccgctgcagttcaacaggggaggaacacgtttgaggaataagtacatctgtaagaccattttggatatagcgaaggtcaaggagagcgcaacattcttggtatcgaaagacccggtaaagaccgagctggggccattttacagaataatactttcttgccccattctcccgaagaacaagcccaaactataagccgataacctctgtggtctgtccgatgggcgaaagccctccggacggattgcggggcaaccgataccttttatagtacgattactccttttttaccttcaggctgtttccctattatacgccggctttcccaaccccgtgaaccagtggaaagtctgtgccgtaacaagtcgtcagggaaaggtacgggaggccgttcaaaaccggcggcagcccggatcgtgccgttccatgccggagcttcgacctgtcgaaacaacacggtattccacagcccgaccggtctttatgccgctggtttcggactttccgcctctgttccgtatctttcccttgtgacctgccacgtcaagggcaaacggtgatacttcttattcgctccgcgctttcattccgcccggtcgaaattcaggcgtggagcggataaggagaatccctttcatgtttgccccggcagacccttgccggacccgcccaagccggacccttttctacttcgcttcccctgcatttatacaggcaaagccgtactccctttttaccatcatatttaccggtctgttccggtctcctctctgccggtgtcgtccggtttgccagatgcaaaggtcggctgccatgcttgatccggcggcttgaagtgcattccccgcaaattcttcctttccatgaaagcgtaattggccgggaaacccgccgtatgaagccctgtcggcagccgtgttccgcatctgtaaaatcccggaacggttcagacagagagaagaatcgaaaaaagggtaaaaaagcagatgtttcacggcataaaagacaagtgatggacaagaaaaattgtaaaacaggcaaacgcatgaaaaggcaggttgaaaaaatcctgatggttatcaatgtcaaatgggaaatcatagatattcttcaaatgtaagtattcgataaactccctcgtagtggataacgtatgttcataatatcgtttattcattttatcgttctatgatttattgttacaccaattcagcccaaagatgtgcgggttttatataagttgatattttccctactaatggagcggataaaaggaagttttcccccttttcccttattttcctgtaataaatgggataaagcggtatttttatccctgctttcccgtcataattagtataaaagggtattctttcccttattttccctatttatcggggataatgaagataaaaacggcactttattccctattttcccgtcttgattggtataaaacggtagttttcccgtgtttaggcgggatttatgaaggtatcaggagtctttcttgggagattccggtggcgtaacggataatatcttgccaccggataacagattgtcaggtaataattcggccagatccatcgagtagtcatcgtcataatcatgtacatgttcaaggaagtagatcagccacgtgcggaagtcagccccggcagccttgcagcagccgaagaacgagtagagcaccgctgcatcttcagcggcatcattattgccacagaacaggtaattacgtctgccgcacgcgacaggccgcactttattttctatctcgttattatccggtctgtagcgaccgtcaagatggtatctggagagtttgtcgaaccttccgtatgtatattttatggcttttccgataggactgcctttcatcactttgggatattcattgaccagccatttctcgaagcgcacaagtatgggatatgcaagacgtgtcctaagttcagccctctgttcgtaagtcaggcgttcatcgtcagccttgcgctccacgtcataaagcagctgtatctgttcgagcgcatagtcggcacgctgcgtgtcattctttcttgcctcccaaaaatatctgcgcgcatgggcccagcagccaagaaggataatgcctttcttggcgtccagcatctcgtacctttcgtacccgtccgtctgtatggctccccggaacttgccgaagagtttcagcaccacctttccacttcgggaacccttgtcatagtaaaagaactgacgtccggtcatgacgctgcgcacaagccagatataacctttgaccgtcttgtgtctctcgtcattcatcacggggattgtcgtctcatccgactgtatgtagtcagtctgcatcaccagatcccataatcggaagtacaggggtcttagcagatccgccacatccttgaaccagtcgttgaccgttgacgcggggaggtgtacccccacacgcttgaactgttccagttgtctgtggaacggtatgtgatccacatatttccctatcatcatgtctgccagcaatgaggcggaggcatagctctttgctatcggcatgacgggaagcgggccggtcctgaactcgtccgtccccttccgtttggctgtatggcgcactatcctgcggatatagaacttcccgggctcgtgcataaggatctcggtcacttcctctccgggaaggagcgtccactcttccggattatacccttcgggatatatatgaacctcctcacgcgcaagattttccggaagggattttctcgtaggatgttgcctcctcgcttttttacgggcgatgatcgcttctctggtagccttcagctccttttccgcttcctctgcggcttcagcctcccggggaagcatgtcgaagccttcaaaatccagccagcggtcctgggcgtcaggctttatgaacttttccgccttcttcccgtacaactgccgttcaagataggatacacgttgttccagactgttgatttttgcttccttttgggcgattatggcatccttgtcagacaataaagcctcatacgcctctttgtccgcagcttcaaggggctgcgtggacaccatctccttcaatcggctgttttctctatacagacagtcgcatttgtgcatgagatcctttatcagtaattccttatcggttggcataatcgtttaattatgatgccaagatactaaaaaacagccggaatgcggcattgtatatgttatagtttgttacaactacaacccatgaaaaccacttcttttataacgcctgaccttgctgccgtccattccctggaccatcatcacaaggtcattccagaaggtttcaatcgctttaacccgaccttcctccgtatttatgaccggcagatggaagtgcccctgttccagcctcatatggtatatcaccagaccaccatattccatatggaggattttcatacaggtacaattcgcattgataaaaatgaaagcgtcaccgtcccgtacattctttcccatctggttggtcacgatgccgctaagcgtataaaaactcttacgcatgtctgtcggatacgggtaaagataatatctgttggattcattcaaagaaaacataggctaacggtttgaattcaaaaatatcaaggtttgcaatacctccggtgacaaagggctgttcaagcggactatgacgccgttgggataggagatctcacatagtggctggggatttggcgacgggctgaccggaggtgcagactgcagggatttctccttatggggaagactgacctctcccttactgtttacctttaccgggataaagccgcctttgcgcaacagcttggaacgccacgcgtagaaacgtttggggcgaatacattcattcgaacaaaaatctataactgaaagtccgctcgacttgaaacgggcataaatagattcaaaatcttccatggtccattgatgtgacataatgattgagcttttttactttggctacaaaagtaacatcacatttttagaatgaaagggggagtttatcgaatacttaccttcaaataaccaatcggcgttttatgtacaatccgcaaacgggaactttaattttaggagacgaaatctacggtaaaaccatttgcagttcccattcacaagagttccatgcgtcaagagcagaaggctgtttcgatgattatttgcgcgggtggattggcacatcgaaaagctaccctcacgggattatccattttgcccccgccgtcatcatggaacagttcgacagagggtttgacgcattacaaatgttcgccggacttgaaggcgtaaacggagatactatcgtcagagggttttgtactttgccagaacaaaggatgggcgatttgctgcattcctccctttgagataccggttctgacaaaataagctatgataaggtatcgtgcctatgacaacatcgtcggtgaagggcacgatacccgtttgtaaattaccgcaactccgttggcggtttccttttatacctctctcttttcctctgctcttatacttgggcgaagccctcttccctttatatcaattatatgtataacctctacggtctcctctctgccgtcaccgtccgatttttcagatgcaaaggtaggctgccgcgcttgatccggcggcttgaagtgtatttcttgcaaattcttccttctacgaagagtaattggcaagaaaagccgtcgtatgaagctgtaccggcagccgggtaccgcatctataaaatcccggaacggttcaggcagagaaaggaaccgaaaagagggaaaaaataaacagttaggtaacggcaggaccaaccaccttgccacaaacaattttctattatgttacatgttcacactatcggacgcatcggcaaagattgccaagtaatttcaggagcacacggctcattcatggctatggacatagccgttgacgattattcaaaggggcaaaacatcaccacttggataagggtacgcagcaacaaggacaaccatatccgcttgtccgaatatctgacgaaagggagactcatacttgttgacggcacgctgtcatcttccctgtggaaagacaagaacggcgagagccagatacagctctccatcacggcagagagtattgcctttatcaataccggaaggcgggaaggcgcggcagccggagaggacaatgcagtaagcggagcagacggcgcacccgttcctcctgcagatttcccgcaggacgaaaaggaggatttgcctttctgataagagagtaaacctttgaaaataagcgaatactaaatgtagtatatcctatatgtagtagattagtaagccactcgtctgcgaatgtaggatatactactcttagtcaaactttattttagtatagtagtaaatactaaaatactacactgctaaaacaatagtttttagtgaattagtatatactaattttagtatttacgaaaaatagtattaactttgcaagtggaataaaagagtgaaacgatgacaaaaataattgcggtcttgaaccataagggaggggtcggaaagacgaccaccaccatcaatctggctgcggccctgcagcaaaagaaaaagcgcgtgctggctatcgacatggacggtcaggcgaaccttacggaatccttcggcctctccattgaggaagaacagacggtgtacggggcgatgaaaggcaaataccccttgccattagttgaaacggcaggaggtgtaaccgtcgtaccgtcctgcctcgacctctcggctgccgaggcagaactcatcaacgagccgggacgggaactgatattgaacggcctgattggcaagttgctcgaaaaccggaaattcgattatatccttatcgactgtccgccctcgttggggttgctgacgctgaacgcccttaccgccgcagactacctgattatcccggtacaggcacaattcctcgccatgcgcggcatggccaagatcatgaatgtgattgccaccgtccaggaacgcctgaatccgaaactcgctattggtggcattgtaattacccagttcgacaaacgcaagacactgaacaaaagtgtggccgaactcgtcaaggattcattctgcgaaaaggtgttcaagaccgttatacgggataacgtatctttggccgaagctcccataaagggcaagaacatcttcgagtatagcaggaacagcaacggagccaaggactacatggcactggcgcaagaggtactgaaattaaaataatcccgatatgagcaagagcgatttactgaaagacagcatgaaaggcggactggacgggttgctgtcacctacgaaaaagactaccggcggaaaacagccggtagcagcccccacggaaaaagaaacggcggttcattgcaacttcgtcatcaacaaaagcattcatacccgtatgaaattcctcgccatcaagaagaacatgtcgctgaaagacatcgtgaacgaggcaatgaaagagtatctggagaagaacgaacaataaacacaggcatggctaccgcgtctgcccaccccggagacggcagccatgcgtccttttttatccgcccgctgtttccatagggcgcattcctcctttatagtcttaccatctttctcttttttacctgcccgcaagtacaggcacatggcccgttttatccctattctaaccctgacgggcatatcccttttctaccgattcccttaccgctttcccggcttcattctctgccgtcaccgttgtgttttatcagatgcaaaggtccgctgtcgcgcttgatacggcggcttgaagtgtatttcctgcaaattcttcctttctgcgaaagagtaattggcaggaaaagccgtcgtatgaagctgtaccgacagccgtgtaccgcatccgtaaaacctcaaagcggttcaggcagagaaaggaaccgaaaggagggaaagaaaaaaacaacgtaaaattgacagcgatatggataaaatcaaattggtagtttacaacgagtacgcactgggttatatcatgcccgaacaacccggcaaagtttgtacgttggtggataggataacgctcggcgcaccgtttcggacaatgaatgaaccctatttcatcgggaaaagagataccgtcagactggcgggcagaaaggactttgacacgtttcggatagtgttcgacgggtacgacaatccggaaatatacgagtatgacaccgcacaataaagacaatagtaatcaaacaatctaatgtaataacaaattaaaatttatgaattatggaaacagcgaacattcaatcagtagtagagaacaacatcgtatcagttgcattgatgaatattcaaccgagcaactataacccacgcaagcactttgacgaggcgagccttgccgaactggccgagagtattcgtcagcagggagtattgcaacctatcggcgtgcgccccattgtggacaccgaccgcttcgagattattttcggagagcgcaggtatcgtgccgcccttatggcagaactgaccgaaattccggctgtcatcttgcatgtttcggacgagaccgccgccgaaatggccgtgacggagaacctgcaacgcaaggacgttacccccatagaggaagccaacgcctaccaaaagctcatggaaagcggtcgctacgatgtgcagtcattggccgtgcagttcggcaaaaacgagaactatatccgtacccgtctgaaattcgtatcattgatacccgaaatcgccgaacttctggaaaaggacgaaatcacaatcagtgtagcgagtgagatttgccgatacggtacggacattcagaaagaggtgtactataaacacttgaaagacagcgacagcatgttgtacgactgttggcgaggactgaaagccgccgatgtggcaaagtttatcgaacgggatttcacgacagaccttagccgttacgcattcgacaagaccctatgcgcctcatgcccccacaataccaacaacatgatgttgttctgcgagggtggttgcggaaattgcgccaatcggagttgtctggccgaaatgaacgcttcctatctcgtggagaaagccttgcagtttgtggaacaatacccctccgtatcattgggctaccaagatttcaacaataacatgcttgcggtggaacgccttaccgctatggggtacgaggtcgagcacctcaatacctatgccacggcataccccgaaacgccggtagcacccgaaaaggaagaatacgacactaccgaggaatacgaggcggcatacaaggagtacgagcaggatttcagcaactatatggaaaaatgcaagtcaattcatgaacgaatcgatacgggcgaactcacgttttatatctgcatcgggcagaaagaaattacgctgtgttacatggcaagtgctgccgccaatgcggacatggctaccgaaaaacaactttccccggtggaaaaattggaacagcaggacaaacgtaacaaggaaatagccgtcgagaaaaccgttgcagacgctaagaaacagattttggacgttgatacgtctgaaagcaaattcacgcaggacgaggaaaagatgatatatttcttcctgctgtcgtctctccgcagggaacacttcggggtattcggtatcggggagaaaaaagcctaccaacaccttgaggacgaagaaaaaatgaacatcatcgccaacctcacggccaagcagaaagccgttatccgcagggatttcttgatagacaacttcaaaggcgcatacggcaataacgctgctgcgaccctcttgctcgattttgcccgtaagcacatgcccgacacgctcgccgaaattgaaagtggatataatgaggtgtatgagaaacgccataaacgtatcgaggaacgcaaagccgccttgttggcaaaggaacggcagacaaagcccgaagaagccgccgaggcagaaaatacacaacccacggcagaggtacaacccgaagaacatacgcaacccgaagaggtcgcagcttgaccataattcaatagtaggacggagaaatccgtcctactgtctaaccaatcaaaagaggtaatgatgaaatgtaaggactgcaaacattacaacggtgcgacaatgcccggagcgggattgtgcaatgccacgcaggcacgtacttttgccacgacggtctgtttcaatggactgttcaccccgaaaaaacggcaagacgaaccggatagcaagaccgggaagaaatagcgcaacgctacagagagagagccgcaggagcggctgtcttttttagcactgccgttggcagatctccctttttatcccttcgttttccttttgtacggaaatcccttcgccaacggctctgcccgtcgggacatgctttttccggtgcaaaggtattgccttggaggaacattcaagtaccgctacgctatttgaacacaatttttcagcagctttcccgattttcaatcgtccatatttcgcggacgctcaataccgcaactataaaattctgcccaaattccttgcctgtttctccctgaaaggcaatctttaatgcacgtaaaaatcaaatcccgacaggagaagcctgaaggcttccgaaaggagggaaaaaataaacagattgttcaactgattaatgttaagattttatggaaattcaatttgctatcgtgcgttccgaaaacagagagtatttgtgctacaaagcaggtgaagcgtatgtagatgccagcaaccctatgattgcttttaccgcaggtgaagatgaatttgaaatcgtagagccggacagctctttcagacagaaagaatacgagttcagaggcgaacggtattacctcgtaccacggttttatcgcaatggctggttggctcttatcttggtaatggtggaagatgaagacgaatatatcgtactttccgtcaatttggaggaaatggatgcgctcggtttgccggaccgtacctttatcgacgtgaacaattacccggatgcgttggactttttggtagaaaacagattggcgaccgattccggctacaaacgcaggagcggcttcgtggaataccctatggctatgttgaacctgccgcttctttatcagcataacccgcaaattttccaaaaagcgaacatcgagccattcggagaagaatgcttttgaaaaggattgttcccaaaaatgaaagtgtcgggttccgaagattgaatgtacaagatggcgtactgataacacagtcagtgcgctatctcctttgtctttatcgcccgccttcgtccttttatagtcagcctcccggataccccgccaccgcccgtttcctcttataattgcattctttcccttttgtagcggcacgagccgcctgtttctcccgtccggctttcccgtccctcaccgcacgggttttatccgatgcgaaagtcggtcgtcgcgcttgattctccggcttgaagtgcacttcttgcaaattcttccttcccaagcgaagcgtaattggcaagaagagccgtcgtatgaagctgtgccgacgaccgtgtactgcatcagtaaaaccccgaagcggttccaaaggaaaaggatcgaaaaaagggaaataaataatcaataattcacaagacaatgggaaaatacgattttatcaagacagggaatctgctttattggcatgacccggacaacggtttgtccgatggggcttaccgagtgatttctgcaccggaaaacatggaagacgacagcattattctgatttcgtccggtacttcggaagcggaggttttgccttcggaattatcgccgataaacacgggcagaagtcataaagaggattttttgcgctggaaagcggaacgtgaagccgaaggcatggagttttataatcgcctttccgaagtcatggaaacggaggacgatttggccgtaggcgacatggtagcatttacaaacgattatggagtagtattcggccctcaagaggtattagctttcaggaagccttggaatggtgacagatgcgtatatcttgacagcgacgcctattggtttcccgaccgtcccgaccagttgaccctcctaagcaagaaaggggcggaatgacaacgacaaacccacccgccacaaaaacgggtgggttcatttcccctgcatgaaatcccatgctctattttaatcggctcgcacgcactccactcgtgcagcgatttccttttctatcgttcctatccattcctctccgacaccggcctcccggccgtattccgggtaacgcgaaacgatgcctatggtcttttctatgaacggctctgcggcctttataccgtaccggcgggctacttccagcaggtctgccgcagtaataccctctgtccggttgttgatagtcatgctgtggcggttgacgtaatacggtgcgtccggatcgaccgagaacgtgtagtcgtaggccggagcaacgtgccaacgcccgtcatcgcccatcaggaagctgaaattcttgttatggtcatcgacgttcccgcccagcacgttcagcaccatcaagcgaaacagttgccggagttcccccggcggcacgccgatacggcaggccgcctcgaatagtgcttcgtaagaatctgccgaggggttcatggcagccaatgtctggatatgcaccttcttgccgttccggcggtcgaaacgctcggtcaggaagtgcgctgtctgctcaccttccaacaggcggctcggcatcatctgaagcccggcgtctacggccatcaggtaataactgtattctatccgtgtcgtcggcatcttctggtgttcgtcgaacttgacgatcatcggcgtgtagcccggataaggggtcgccacctgtccggagtaacattgtccttccccgaaattgacgttgaccaccgctttgggccgtcgtcctcctgcggacgttcctaccttgaacaggctttcgaccatcaggttgcccgataccgggacgttgaaccgtccggcttcctcgaaagcctgccgggccagttggtagaggtcagcgatctccaccttgaacggtgtctccagttcctcggcagtgggcgggacgaactccaatgcccccatgccgcgccgtccgatataggcgagacggtcgagggcggacaagtccctcatacggatatgatgcactttggcccattcgttgaacacggtgtttccccaatggtcgggcagcgaatcggctatgaacgagggcaggccgccgaaaagccgctcttcatcgggatagaccggcaggccgcgctgtgcggcaaccccttttaccggcgcacggagcggggcgatgtcgtagccgtcgcggacataatcgctgtcgaagtagaaacaggctttgctgcggtgtccttcccgattggcgacaagcgtgccgacctttttatcccataggattacatcgagactttctatcatttcttgcccctcctaactcgtttaggtatcagtttctcgatttcccgaagcgccatcggcggcatgggaagttccggcagaatctccgcgagccgctctgcctgaccgagcgcacgcagcagggagatgaaattggccaaggtcaggttacggctgaccccctgctcgaaatggctgatagtcgtctggcttacacccgactgttcggccagctccttctggctcatgcgggcggccagacggtactccttgacccgcttcgccaaaagcgtcagcatatcgctgtttgtggtatagttcgttgtttccataatgtcaatatatcactatttatatgcaaatataacaacaattatccatatatagatatataaattctcttttttagcttccagccgtccttttctaccgctttcaggtctccgtattctctcccgtctggctttcccgtccgtcaccgcaccggtttttatcggtgcaaatatgggctgtcgcgcctgattccgtcgttttgaagtgcatttcttgcaaattcttccttctgcgaagcgtaattggcaagaaaaaacgtcggaaagggctttttcgccagccccggaaagcaccataaaacccgaagcggctccggcaacaaggaagccgaacagagggaaagaaaaacaattattaaaatttaacaaatgaagacattagaagaattattgcaagaactgggctgcgaaggtagcgcattcgacagtaccggagaatttacaaaagcgggagaaaaggcgtatgaacgcttggagcacttgctgtatgacatagaaagtcttacaggcaaaaaggtgacacccataattgaggaacttgacagaatatgcaacgagaactattaaaattcaagaatatggacattaaagaaagcaaagaataccgcctcgccaaagactgggaaatggcggtaaacagtttcagtttcaaccccgaacggttcgcggcggcaatcccggacatgcacccgacgcttcagcaaagcctgtaccgcctgattaaggcgtgtatcaaggtcatggcggacgaaacacgccgttacgatgaccggaaccgggcatcgcacgaggaagcgaagcatatcatggaatacctcaatgaacacggaaaaaatgtaccattaatataaaaacgacgatatgaaaacaactaagattcaattcaacggcaggtcttattactcccgcatcgtggaatctgtcgatggcgaagaattgcttatcggttcgacaatcctgctcgatgccttgcagcccggcagtttcaatgacgagaacgaaggttttgccagtaaagaagccgaaaggatttatgacgagattttcttctttaccgacgagagaacgcttcagcttcccgaaaacgagttgatagccgaactcaaaaaggataaccccgattggttcgagtaaatcatggaataataatttataaacttagaattatggaaaaagaatatgtaatgcaggtcgcacagaccattaaggaacagttagtagcgttaacccccatgaccgtcctcatgtcgtggggtatcaaagagtttgccgccaccctatacagggatttgccggcactccgcattaaggtgaacggacggctgcacgcagggtacgtcatcgtcgcactcaacggatcggattattacgaggtctatcttgtgaaaggaatggaggtggaatgtgtgaacgaagaggtttgtttcgacgagttgggagacgttatcgaccgggctatcgagagcggcacggacaaagccgagtacgataaattctgcgaacaggagcgacagaatttatatgtaactgttgtcactgtctgattcctctttttaggggatgaaagccgtgcctttcggaaaacgagcagggtacggcttttctatgtataatgcagaaacgaataaaaacctgccgtttataaaacggattacctacgtgttacagtaccttacctcttattgtaaaaaggtttgttttatcttttggccggcagattgtttttcacttcaagatgtcgtttctttatctgtctactgcctttttacttgcagctctatttacgaccagaatgctcgcttcatataaaacccacatcggcaatgtgaccaatgacaacgtgaacacgtccgaagtcggcgtgatgacagccgcaacgataaggataatcactatagcgtgcttccggtaacgtcgcatgaaatcggcggtgagaaaccccaatttggcaaacagccatgataaaatcggaatctcgaacacgatacccattgtcaggcacatcagcacgagggtcgaaatgtaggattgcaagacgatcatgttctccacttcaccgctgacctgataggttccaaggaaacggaatgtcagcgggaaaataagaaagtagctgaccgccacacccatcaggaacattgcatagccgcctccgactatccgcacggcatatttccgctcgcaggcatacagggcaggcgacacgaaccggaacaactggtaaaggatatagggcgacgcgcacaggacacccgcgcataatgccgtcttcatgtggatgacgaactgcccggccagtcccgtgttgatgagctgcacggcaaaactcccggtctcgccgccggcccatgctgcaatccggttgaaaagacggtacgtgatgaagccgtcgtttttcggggcaaggataacggcaaaaagtttttccttaaaacaaaaggcggcgataccgaacacgacggccacggcgacgattttaacaatcgccgtccgcagcacgtccaagtgctcccaaaagttcaagccgtccgttttgtcttcctttgccatgtcactcctctttcttgtcggtattttcgggactgatttctttctccatgccgttcataccttccttgaatgaacggacacctttgccgatgcctttcatcagttcgggaattttgcgtcctccgaagaacagcaggacgactaatgcaatcagcagcacttcctgcataccgatgcctccgataaataatggtatcatatgaaaattgttaaaggttgttcgattaactcaatagtcgttttcagtcatcgttccgccggctattcccgccattttcagaaagttccttcgtccatgactccgccttctcaatccagtcctttctcatgtaaccatctcgacaggtgatcggccacctccacgttgttcaaatcggagaagggaaaatgggtgttgcccttcaaacctatctccggcagatgaatgaccgtgacatcgccgccgtgttcgttgagcaaggcagcccatttgcgcatcagatgcaggcgtcgtgtccattcgtacagttccggccgttcgtcggtttccggcagattgtcgccatagtagatgatgatagggattttcgtgaactgcagaaattcttccatcggcacttccacgccttcggtcttcttcgacagggttagtactttcccttcctccggcatctgcccttcgggaaaaggcacgtttgttcccggctcgtaggcgacgatggcacggatgttccttgtctgcggcagtgtaagccatccgacacctccgccctgcgaatgggtgacgaagacagccggacctatcctgtcgaacagtgcggcatacgccttggcgtagacatccagatcgggagggccgagagttggcgtcatctgacggaaatactggttcagagcctccttgtcgcggctgaactgcacgccctcgaaataatcgggccagatgcccacgcggaaacggttgaaccacgtctcctcgtcgaagacgggggtaacggtcgcgggtgtcgtgctccgccccgcgtttccccggcggggctggtcgacgagataagtctggaaaccgcggcgcaggaaaatattctggaacccctcgcggccgtccggcgtagtttcccatgtcttggaaaactgccccacgccgtgggcgaagacaagcgggtatttccgggcatcgacgggtttctgatagaacacgtaggcgtggtcgccgtgataggtgcgccccagtgaatcggtgagcaccgtgccgcccacggcgaaactgccctgttcctcgatttgcatgatattcccgttgcgtgcgttgcaacccgacagcaaggcggcggccatcatataaaagacaacctttctcatacgcccttcctatttctggattttcgattcctgcaaagcgtcatagcggcttcccacgaccggaattgcggccacggccttttccagctcggtcacttcttccgacgtgaacactatgtcgcaggcccgcaggttctcttcgaggtgcgagagcttggtcgtgccgggaataggaacgataaaaggcctcctgttcagcagccatgccaatgccacctgcgccgtggtaatgcctctcgtccgtccgaaagcgttcagtacctccacgatacgcgtgttggcacggatggcttcgggctggaaacgcggaagcgtctggcggttgtcgttggcggtgtcgaaccgggtgtactcgtttatcatgccgccgaggaaaccacggttcagcgggctgtacggcacgaaaccgatacccagttcctcgcaaagcgccagcacgccgttttcttccaccgcgcggtgcatgaagtgatactcgctctgtatggccgtaaccggacataccttgtgcgcccggcggatggtttcagcattgacctcgcacatgccccagtgcagtatctttccctcccggataagctcgccgcatgtttcggctacgacctcgatgggcgtcgcagggtcgacgcgatgctggtagaatatgccgagcgtctccacgccgagattgcgcagggagttctcgcatacgcgccggatgtttgtcggggtgctgtcctcttcggtcttcacctgcacgccgttcacgaacttgtgcccgaatttggaagagacgaacacgcggtcggtatagcctttcagggcttcgcctaccagtttttcattcttgtggtagccatagctttcagccgtatcgaataaggttacaccccgttctatcgcttcgtgaatcaaccggatgcaggtcttttcatcgggagactggctgcggtgatggttcagccccatgcagccgaagcccatcgccgaaatggtaaaggctgccttgccgctgctcaaggtacgctgtgcgcggactgctgccattcctgctggaatggttgctgccgatactgacgatttacctgtaatggctttttccgcggccgttactttctccaatgccggcgcgatgcagatggccgcgcctgccaatgcggttcgtttcaggaacccgcgacgactgatgccgttctcttgaatctgttcttttttcatgtcgttatctgtttgattatctttctgattgcaaaattagataggggaattaagagcctgtgtatcaatttcacggatagaattaccaatttcaacgggccggtaagaacgatgccggtataccagtaaaattggtatccaaaacgatgatttcggtatatgccgtaccatcgggaatccgtatctttgcttttaattaaaagcagaatgaaaagctatcacagaaaaatagctatatttgcaatgacttaaaaaagaggaaattatgagtgaaataatgaaggttgatacagtccagcagtacaacgactattttggcgtggagaccctgcacccgttggtcagcgttattgaaggcagtaaagggaagcctctccggttcgggaaaaaactgtataacatctatgctattctattgaaagatgcgaactgtggaaatcttaaatatggaaaaagtatatacgattatcagcaggggacgatgcttttcctcgcccccggtcaggtaatgggatctgaagatgacgggcagctgcaccagcccgaaggatgggttgttgcatttcatcccgaatttctgcgaggtacaccattggcgcatataatgaaagattattcatatttttcttacaatgccaacgaagccctgcacctttccaaacaagaaagacggacggttatagaatgtatggaaaaaattcgcattgagctgcagtatcctatcgacaagcacagccgttcgctcatcgtggataacatcaagctgctgcttgattattgcatccgcttctacgaccgtcagttcatcacccgcgacaatgccaatcacgacctgttagcgcgtttcgaggaccttctggatgagtatttcgcctctgatgcccctgcaaggcatggagggatgccgactgtgcaatattgtgcatacaaactttgtctttccccgaattatttcagtgacctgatgaaaaaagaaacgggaatgcctgccctgaaacacatccagcagaaaatgctcgatgtcgctaaagagcgggtattcaatacggcgaagtccataagtgaaatatcctatgaacttggatttccatatccgcaacacttcagccgttggttcaagaaaatggccgggtgtacgcccaatgaatacagaaccgcaaattagctttattttttattttgtgaatgactgaccagtaaaacaccggatatgacaagtatggccgaaaccggttcatcccagctaaaaatgtcctgcccgattaaaatggcaacgacagaagctataataggctgtaggttgatgtaaatgctggcagtggtgggctgtatccccttgagagcgacgggatatagcagattgttgagaacagttgccagcaacaatacgaatacaagctggagtaatggttgccaacagaacgcggactgataaagcggttgcacgtacaattcatttatactgaacggcagcatggacaatgctgcaaataggaacatccatttttgaagtgtgacaggagagtattttatcgccactcttcggatgataatcagataaaatccgagcataactgtattgacgatggcgaaaacaatgccaagtatatgattttcaacggatgcggcaatatccatttgtgaaatcaagacccatgctcctgcaattcccaacagaacacctgtcaacttccgccggttgatagcttcttttaaaaacaatacggaaaagagcataactacgattggatttaaggcgacaataagtgcgaagtgaactggtgtcgtataattaagtccccacgcaaaggaaagataagtacaagcaacaccggaaataccgcccaaagcaatcaccatcaagtctttggcattgaccttttctctcctgaaaacaagcccgatcgtccaaaatatcagcgtggcgaataaaacacgagaggaggcaagcccaatcggtgtcatccactctgccaggagcgatttaccgacaggtacattcaaaccacaaataatttgtgtcgaaagcatggcgatatgtccgttcaaccctttgttcacatggatttatctgtttgatagagagtgcaaagatacgactttattttcataaactcccgtcgaaactgcggtaaaagactgaaaggattttattgttgtttccgtaaaaatggttgtatcaaccgggctgtcctcaaggaaatattcgcagatatactgtccgaaaaacaggttcgggagtttatctccaaaacggaagatgcaggtattatacaaaaaaagggggactggtaaatgtacccgttatataaaaaacacctgatttcccttcttttatgtagggccgcaagaagctgattttgaactataagattttcacaatagataggaaacgccgaaacgtccgcaataatcacggaatcattgcaggcgttttttagttccctcatatcggaatctggctttctatttagtttcccgtttgttcagcacgtcctttatcatttcttttacctccattcccacattcacgaaattccgataaagaatgcgttcctgttcctccctcgacttgaacgtgtggaacttcagtaacggtacatacgccgcttcccccttcttgatttccttcatgtcgaaatccgttttgcagaagaacttcgaggtcttaaactcctccgcttcctgtacgttcattgagccgcctataccggtttttgtttggatgaagtcctgagccgtctggccatatatccaacctatctgcctttgtattgaaaagtacccatatcagcaggattttgctctctattacttaatgatgttgttctatttttgcagcctgtaaatcaacgatatgtaataaatggattatatcgacaaaatatttaagacagtatcaattaaggatagccgacggattattgaactttattttcaggagctgtattgttttgcgccactttccaacaaagccctctctcaaaaattactcttgccggtacctatcgtgaccgccataaagaacgaaggtatcaggctgggcatattggaacaatgcagcggaggcgtagggcttactcataacggaaaggagtatgtggaacaagctcttggattcaaggggattgacctctgcctgtatcgccgactggcggaaagcgaacaggcaagggacgcatacgctgacgcgctgagtaaaaaataccgtgcggcattcgacgaacgccccgtagcggatgtagcactggaccaagcccaatgtaccgtacagacagcattccgcagggctttgctctgcttggcaaacggcacattgacaggcagacaaatcgtatgcatgggcgatgatgattttgtcagccttgccatcgggtttctgctgaaagaactttatcccggtccaagcatctgcccgacacacatccatgtacttgagatggacggtcgttatatcgagtgtctggagcggctggccggacggttcgccctgccgataagttgtgaacgggtggatttgaggatgcctctgcctccgcatttgtgcgggcgtttcgactgcctgttcaccgatccgccttatacgcaagagggagcttccttgttcctgtcacgtgccattagcgtactgaaagaagagtccggattgagaatctttttctcgttcgggaacaagtcggcaacggaggtttactttctgcaaaaatgtttccaactgcacggactggccatcaaagagatgttcacccggttcaatgaatacatgggcgcatctcttttgggcaacaaaggacagctctttgtcctggaaacgacagaacgtacacgcgccttgtttcctctcgaaaaacgagggcgcgatgacatctacaccgcagaccgcaatctccggcaaaaccgttaccgctgccggcaatgcggcaaagtctatgccgtggggaaagaggcggaatatcagaccatcagggagttgaaaaaacaaggctgcaatgtatgcggagctacggttttcgacagactgcacaaaaacgggaatacggataaaaagcaataccttcccttagggcatcacatccttgcagacttctacaactgcgacccggaaaaactggacgatgtggaacagattcgcacattcatgcacgaagcggcagtaagtgccggagcgaccatagtacaggaaaactttcacaaatacgccccagtgggtgtgagcggtgtggtggtcatccaagaatcccacttgaccatacacacgtggccggagtgtggttatgccgctgtcgatttgttcacatgcggcaccaatgtccgtccgtggactgctttcgactatttgcaggagcggctcggatgtgcgaaagtggaatacagcgatttgatgcggggagcctatgagcggccaagcctgttgcggtattcggaaacggaacagcctgccgtgcggcggaaaaagcggcaaaggtacgacgcgtcttcgaaatggaacagacgggccaggtctttgacggactgttctgtgttgtccaaatagcgtttgagttccgttacgacaaacaggtcaatgatttccttcggagtccgctgttctattttgcaggttatcttataaaggtaatcggtcgtgatgcaaagcctgtccgcataatatcgtacatctctttttacatggaaattcttagccagcagtgacatgaacttgccgaacagcacccttgactgatccttttgataacacttgcccaagtcgggaaacatcggcttgaacacaatatctaaagccagaaaaacattgtaaatgcaattttgcaggatgtttttccggctttcttcatcaccgttctccatcgcccatatcatctgcttgaacactccgtctgccaatgagtattgtgcttccgaaagtcggcagaccggatattcatacagtccgtcccaaaatgcgggggaagtcattttgtagaaaatctcccctgtcagttccaatgacaaggatatatattctgccgtgaatgaaggagaaacacacagcggtgcaaataaggtgtccgaaaacaacacaagcaaatcacctttgcggaatgtccgttttcgtgtattggtggttacgacagcccggccttcaacgcataacagcatggtacacccgtttgccacgaaaggcagtttacctgacaagtcacgcaggcttgttcttccgtgtttgtattgttcgccatgcgagagagcaaaactttgtatgccggacgttatcataacaatttcctttccatcgttacatgggttggctcgaagcaatgctttttatacaaagagcgcatcggtacgttcccggcatgaaccttgccgacaatataagccgccttgcactctctcgcatattctatgcttttttcaaacaggtcgtctacaatttgcattcctcgaatgcactcatccgcataaatggacttgaagttggcataaacctctccggtcaggctgttctgctttttctccatccatacccagcccacaattttaccggattccgtgtcttctatcacgatcattccgcgtcggtcttttgctttggctaatttcttgcagtggaactcgaggtcagtaatagccttttctccgaatgagatttcagaaatttcaatttcaaattttgccaccgcttcaaagtcttcctcttttatttctcgcatattgtacatgattccaaatattgtttttccgttaacaccaatctgtccggcatgatgcccataaaaacttatcccttcttcggaaataagaaggtctgtagcttttccaatcccgccttgtgcttttgaggattgctctttttcagcttggcaatgttctgtaatttccattttacggacggatagcggcttaaatctccggcacagcatttttcccaatcgggttcgccgttttcaaatgacagaagaaattcccggtctgtttcggtcaggctgtcgtttacctgctgaatgaggttatgccttgcctcttcataatccgaataagtgaatggagtatcggacattccctcaaactgcttttccagtgcttccgtctggtcgatggcgttcggctgcaaagattcgatgacaggcttgtcgctccccaacaggcaaagcatgaagccgttcttgacatcatgaaacgacgccatttccatatacttgcaatcgaacaggtcccgtgggtgttggcggcttaatgccgctgcaattttgcccccgtaaagctgcgaataagaaactgtacgtgctttacaggtcatattgaactccgtttcagcccgttcgcacagtttcctgtcctctgtctctccgatgataccccgctttgtcccgttcacttcgattttgacggtcgcaccgtccaaagtacattgtaatttccagacatcatgcttgtggatcacttttatgcccggtatggatttttctatgtagcttttcaaagttcgcagatggttgttgattgcgtccagactctcggccctttcctttacgggaatataggtgaggtctatatcgactgaatagcgaggcatgtttttatgaaacaggttgatagccgtacctccatgcacagcaaaatctttgatgcggtacacggacggcataatgcgtatcaacaatgccacctgttttttatagatgtcattcatattcgttcagttctttaggtacggttattttgtatttggagatataaatcccgttttttgacagttgcaatttggaggttcccagtcctattttggatgtatcaagtgcctcgaaccaatagtgtcccgctttttctgccatataaaggaacatacgctttactttaaggttcttggtcgtttcgagcagttgctgtagcatttcgggacgcagcgttgtcagttgttccatcatatagaacaagtccatataggaatattgttgcggtgcaagcaacagacattccaagaatgcctgttcaggtgtagaaaccagcagatccacttcgtatttcacaatcgttgcggtctgcggttctgaaaaggtatcggtggaaaacggttttatcaccctgtcgaaaacatcgtggcgtatccattccggaacacgctgtttgccgtgtgccaccatcagcaacggtttccccataggcacatagtggttgaagccgaacagttccaatgcagaatgagctgcgacacggaacgtcttgcccaattgcctgttgtagcaggacaatgcggcgtatgccgacaggctgtctcccgttcggtacatgactccctttgacagcatctcaagccagccggattcccggtatctttttatcaactggtcggaataaccgttccttttcagccattcggagaataacaatcctttgggagtggcggaaagcagcagttggtttattttgcttttttgttctatatccacagtatatgatttgttttctttttcaactgcaaaggtagcattattttccgttccaaaggtcttgaaagttgattttgtttcggtataatatactttttgtgtagtattgaataccaaaaccaactccacaggattttccaagataccggaaacgccaaaacgcctgcaataatcgcggaatcattgcaggcattttttttactttccctcatatcggaaacaggtttcttatttcgcccctcgtttgttctgcacgtcctttatcatttctttcacctccattcccacattcacaaaattccggtaaagaatgcgttcccgttcctctctcgacttgaacgtgtagaacttcggcagcggtacatacgccgcttcctccttcttgatttccttcatgtcgaaatccgtcttgcagaagaacttcgaggtcttgaactcctccgcttcctgcacgttcatcgagccgcctatgccggtttttgtttggatgaagtcccgtgccgtctggccgcagatccagcccgtcggcatatccgagattttcgaggcgggtacgaggctgtccatattttcgttcagattgatggaagtcttgtcccggtctatcgtgacacccttcttgatttgcaccaccttgccgaagatgtcgctcgacaaccattccagcgtttccttggcacgggccgaaccgctcaccacgttacccaccgtcgtgatgattttctgcatacccactttcccgtaatccgcttcgagctgcggcagttcttggaagccgagcgtcacgctcaccttgttgcttcgtgccgtgccgatcaggcggtctatcttgtggaagtacagcgtcggcagctcgtccacgataatgctcacggggacatttttgccctgtcccgtattcacacgggtaacgaggcggttcaggataagggcgttcaacgctccgataatgctttccatttccggatcgttcgctatcagcaggtagctcggattcttcgggtcgctcactttcaggtcgaagtcatcaccgtcacggtggaatatccagtaactctctttggtcgccagacgagaggtatagacgcgcaatgtaccgatcataccttccaactgttccatcgcgcgatttttcaaagcggtctggaacggaccgagcagcggggcaacctcgttgtcggtctccagtacctcgaagatggtctggtaactctcgttcaggaacgacaggatatgcggcatatccgaatacttgcctaaccagtaggcaggttcaacgatttccccgccctctttggcgcgtaccacacccgtcggtttccagaatttcgtctccgggtcctgccgtttttcagcgtacaatttgtttcctttggcatcgtaaggctcgcgttcatagttcacgaaaaagtagatgcaggcggcgaggaagttcacagccgaagtctggaaaaactggtcgctgccgccgcctccctctttcttgcctttttgcagggattccagcagcgtttccgccgtttcgctcgccgcagcgaggttgttgatgtattttgcctgaattggatttacccggcggctgtactccacgtccacgaagttaatcatattgaattggcagccttggggcaactttccgagcttctggtttttcttgtagtggtagtacagtttcgtggccagcgtcgggaacttgtagtcatagaccaccatcgcgaaccccttggccgagtgctgtcggataaacggctcgatgatactgaatgtcttgcccgaccccggtgttccgactacccatgttccacgaaaacagttggttatattggtccagcctttacggaacttgcccttgtagtaatatcgcatggggatattcacgctgtacggagtctctatcagttcctcgcattgctcgaaactttcattctcgaaattgaaacgatccttcatcagtccctctttgaggaacttggagatgttatccagtgcgacatgcacgaggataacccccgtgagcgataccgccatatagagaataatgttcagcggcagcgtgtagaaccgcgtctccatcggatgaccgaacagccatacggacagcactaacagggcaaagccgctcacgagcgggtacaagacctgccgccgggcgttgaattccaaatgtttcttggctctggtgccgatacaggtaatgcagatcagcagcaccgtggcgaccttgctgtacacgaggttgccgtcgttatagatggcccaccgtttgatacgtccgtgaatgtcgcagagtatgccgccccagtggtccagcatggccgggtcgatggcatactcgaaaaactccatcagtacggagacatacaccaccgcacggaatatccggtaaaatccctgtaattccttgctctcttccattgctatgtcaattctttttaataccccagaggacgtggatgtgaggccattgcatacggttatcagcggaaagctggcagacatgggaaactgcatatagaggtttaagcccgtcatatattgcagaagcccgtacttccgctgtaaacttctcaaggaaaatccggacggcattgtcagagccataagtcatgaaatcaatgaaatcttcaatcaattcttcattgacatagcagagctgaccttggaaaatatcatggtaacggctgatacggccgttccattctgcccggatttcttccctgcgattctttacggagggaaacctcttgtagcagtctattccatcgtcgaggaatatgaaattaccggaaacgtcctcttgtttaggacatttgcatcttaacagatacccgaagaatcctttgtccggatgtactatatccacatactgtggtgcttgaaaatctttaattccgttcataatcataaattcagttgttgatggttataatgggacgcactttatgcgcctgtgtcttgggcgtttcctgcatggttccgctggctgtcgagtagagccatgctttgactgtctgctgtccttccacctccgtcgatgtccaataccagcactcgtcggcctcggtcggcagcgggtcgccgccgcatttctcgataatcggattgatgacggtctgtgccgaatacagcagacgcatctgtgccaccgaggggatataggcgctctgtccgtatttccacaaggcaaaaacggcttcagccatcggcgaggccgtttcttccgtatcgtacagggcgaacgtgttctcattcccgtcgtatgcagcaatgtccgccgacgtaccctgctcgacaccgaggctgtcggcaaaagccttcggcgtcatgtcccacagatagacggcatagccgtttccttccgtttccccgtccgaataggtatggaagacgacggcaatcgcctgtttcccggaattttcatactcgctgtacggcacggccttgccgtccacgcagaggacatgtccgggacgtaccgtcttgtcgggttcttctatatgtgcgtcgcaggcagccaatgccccggttatgaggagaaccggcactacctggcacgtttttctgatagtgttctgtttcatctttcccttattttataggtagtttaataccgagggcaactcctgtacgcagcacatcggccccctttatcatcacgtctcccttgacttgccagtatagcgtccagcccgcccgcaacacatagttgtgctcgtagccgaaatgcagcccgacaaggaacttcctcgtatcgcttccgcccgaagccccgatacggaggcttccgtaatggttgcgtcccctcgtgacgcagggtttgtaagccacgccgaagccgtaggtacggtaattctgccagaaagatttcgggcatacatgcttgcaggattcgcactctgcccattgcaggtagccgttggcaaagaactcccacgcatggcggtagttcatctcgtgttcgtaggccagcgtcacgtccagctcgttcttgtacagcagccccgctccgagcgaaaggcggccgctgccccgttgtgcattcgcgccgacggcgaggcacatgcaggcaatcgtcaggataatcgtctttctcattgtcattcctcctccagcaatgccgtgctgaacgaatcggccgacagcacgtcctcatagtcgatattcaggctgatagcacgcccgctgatttgtttctccgtcatctcgatggtcagtaccttgtcgttcgggaacgtcattttcctgaccacgaccacattccggtagccgtgccggaacgtcttgcccgtctccagcaccagttccgggaccagttcgatgacttgcacattagtcgctttggtcagtttcttgtccgccagcttcacccgtatctcgtcaatgtcgaaacgtatgttcgtccggttctctattgagaagtcgatgaagaaatactctcccacggtgtagatgttgttcaaccgcatggtcatgcggtgtgccttggtggcgacgttgcggatcttcgcgggcgagttccagatacgccgggcgaagcgtgtcatctccacggtggacatcgagaccgccgggttgtggtaggcgtttcgttcctgcaactggatttccttgtcagttaccgcctcccgcacccgtgtggtgtagagcagtgcatactgcgtgcggtagcgttccgttacgatggtcactatggccagcacctcgccgtcctcgtgtccgccctctttcggtttcaggcggacgatgttatctatcggctggtcaccgacaaccttatcggtggagatgtccacgaagcgtaccggttccgaggccgtgatgaccgtcgttacctgttcatttaccgtaagttgttccatctcctcgtaggttcgttgtgcctgtacattcggcgttcccagcagtcctgccgccagaagaaatgccgttacgattccttttttgtccatgtcattgatttattgattttgtttttcttcccttatctctttttcctcttgtgctttgttcctgcattccagttcctcctgaatccgccgttcggcaatctcgcagtacacctgttcgatttcaaatccgatgtagtgtcgtcccgtgcggatagcggccacggcggttgtgcctgacccgatacagttgtccagtacaacatcgccttcgtcggtgtaggtccgtatcaggtactccatcaacgccacgggcttttgtgtcgggtggtagaacgcgcctttcttgtgttccttcggcatgaagatgaccgaggtcggatatttgtcatcggctatgcgtaccggtgagagtttcatcgttccgtaacaacggttggtaaatccctccgttttacgcctcccgtgatttctccgttccggaggacacggtgtcatctgcggatgatagaccggctgttttttatagaataccagaatatcctcgtgctgccggagcggcatacgtttggcattgagatgtcccgtcacccgatctttctgccacacgaggttgtaccgccatagccggggttgcgacagcatgagccatgcggagaaaagcccctgtccgaacaggataatggggctgtccggcttggtaatccgccggtattgctcccacaaggctgcgaacggtatctggcggtcccagttcaccgacggattgctgcgatttaacaccccgtaaggcaggtcggcgattatggcgtccacgctactatccgctatctgtttcatgccctccatgcagtccataaggtaaatgcgatccgtctctatcatattgcgtctgttttcagttctacaatttgtcgggcgctcatccaggtacagcgttccgtccgggttttccggatttcacactcccagagggtattcttctccacatgtttgaaattgaccgcaccgtctctcggcccgtaaaaaccggtatgcttctggaaggcgaataaggcaatcctccgcccgtcttctgcctgaaagttgcatatcagggcgaatcgtacccctttgtgccaccattcggtacttacgagcttcccaacgaatgtttcgggcttatcgggagcgatgtagtcctcgtaatagaagccgtccgttcccttatgaagttttgatatgtctgattccattgtcactgcccttttagttcctgttttcccgtccgttcaccagatacacaaacgtcccgtatttcagcttcaccttgtttttcttgatagccttgctgatggcgttactcgttttctggtaggcattgttcaccgcctgcataccccattgggcgaggctgttaccgtatccgctggtattcatgttcatgctgcccgacatggcactgctcgccacatccttgcttgtctcgcggaactggctgatgggtacgtaaagtccttccagcccgtccgtatcgtagattgacaagctgaccttgaccagttcgtcctccaccaatatgctgttgatgcttccttttacacgtccggaagagaaaccgctgactgtggcatacaggtaagtaccacgcctgaccacgctctcgttgatttcgatgtcgtccagcaggcgcagccgcacacgcgagccgtccacggccttgatgttctcgtcgatgatcgccttgatgagtttcggttcccgagcgtctttcgccagtgtgttgaagtagtccgaagccgtctttaccttcttcaccacctcgcttgccttgtccgtctccgcaggagctttgaccgaacggctttcctcgtcgatggttcccttggcctgcgtcatcgtgtccggcggagccgccgttgcggtgctgtccgtttcggacggcatgacctcccgttgtcctctcaacctcgcttcggcgagtgctttttccagttctgcgagagcttcctgctcccgcctcttggcatcggccgcttccgctgccagatcattttccttttcctgccggtcaagcagggcgatgtcctcttcggtgtactgcgattcatattcctcttggttattgtccggttcgtcccgctcgatgttgtccacagcggaataatcttgtatcttgccccatgatttggccatgttctcatacttgctgccgataccgtcgccacccttgatttgggcgtccggcaattcgggattcaggaactcggtcgtctggagtgtcttatcctgtacctcgaccttctcggtatggaacaggtcgaaaaagaagtacgacgtgccgagaaggggaatatagaggatagccggaagcatatactttggctgcctgaaattaattctcttgaagatattgttcattgtttccctttaattgagttgcacatacttgcttatagttctctcaaacggcatattcataagcctgccgttctattccggcctttccgtaccactttccttcgtatcgaatcttcgtacatgcggtacggaaagcatcttatgccgttcccggagcacggaatcctgcatctccgtggccgtccggcgggtcggatgatggcggtacaccaccgtcaggcggtaaatattccatgtcagcccgcagatggcgaagccaaatacgatgacgagaaacagcgtccggtgggcgttggcgaaaccctgtactttggccactgccttgtcgatacgtgtcgctttggcgaagcgtcgcccggcatccacgtcgcgttcgtagcgctccttgtatttcgggtcgttcttgtccggcatcttctcgccgaacagcatacgtctgaatcctttgatattcataggactggtagagttaatagttgctttttgtcttttgctcgatgtccttgttcagcagcgtgcgccagttcacaatgagcagcccgtgcgggttgttctccgtccggggtacacgcttgagctgtcccgccgtaaccagttcgcgcatcaggatattgctgcgccgttcgatacgctgccgcccgtagtaagtgaactccatcttctccttgttgaaggtgatactgtcgcagaaaatcgaaaagacggcactcgttcccaagatgttggaatagaaacctttctccttgagcgtattgtactgtgccaagcccgtttcgtccactaagtacatcgctttctccatcgtgtagcggatgtacttgtcgtcgggagcaagggtaaagaagtagtggtggaacatctcgacatggctcttggcttccacgtcaagcgtttcctccatcgtcgtgcggcgtaccagtataggcacgttgctgtccagcacatacaccttcttttgagcgtccgtaaccatcatgcgggccgtccagatactcgacacgctgatgatgacgcaccccacgagaaaggcggtgcagataattccgaccagtttgattttgttctctaaattcttgatgaccattttgtttgaatatttatcgttactttgttatctcattaccgtacccattgcgcccgtcgccgtcattttggcctgctgtgccacgccctcgccgaagtttcgggttgagaacgccgtgtcaccctccggtatcatccatgccgcaaggtcggggacgaggttcaggcattttagggccacgatgcttgccgccatcagatagcccgccgagaagaaggagttttgcaggtaagccgccatcgtctgctcgcttgccgttatcgccgttaggttctctacctgtatgcaaagtacgatgtcgaacagcagcagcacgtagaagcccacgaagtagagcatcgcaccatagaaatgcaccgtcagataccttgtgagccacttcgcccatgcgccttcccacttgggtaggagcgagaacgcccattggataggtccgaaaatggtgagcattcccaaaagaatttgctgacaatagatggtcgcccaccaaccgattctgaatactacaagggctatcagcatgatgattttgtcaatccccacgattacccccgaagtcagcgaggtgaaccacagcttcgccgcatccttctccatgttcgttacctcgtccacacctgtctgttccatcgttgcctcgataaggtttgggtccgacgtacccgtatgggcgacatcggcctgtgcctgcagggcagtgtacatcgtgtcgcgcacgtaaatcaactcctgcacttcctcgaacttgtccgagatttgcgaggcttcggcctcgtacaggtcatgtgtgtacgaaccgacgcagttcgggatataggagaggaaatctaaaaagcaccagttgctcccgctgtttgccatgcccgtgtctgccggaggataccaccagcagaggataagcgacacggccagcggtctgaagagcttcatcacgtccaaaggctcgtgcttgaccatcattttgtacgccatgcctgccgccatgatgatggcgaatagggcggccagtgccatgcacatttgaagaatccaccagaagggaccttgcgagccggtaaaggtcgcatcggtcagaaactcgttggtctgaaaaatcacgtcgtcgatttcctcttccaagaggtcgataccgaaatccgaaagaatatttccgtctgccatacgttgtgtgtttttagttctttctgtttaccgtctcgtctccgtctcccgtatcagtttcgccgcccgattgcgcccctcgcacggcggaacgcgattcgttccaccggcccatcgcctcgcggacgataccgcccttgtccagtctccggtcggcggttgcattcagcagcccgttcgcaaccgtggcgttctgtcttcgggcaaggtagccgaccagaatctcgttctgccgtaccacgtcctcgtagattcgcaggtactctttcttccgttgtgcgttgggcatgtaggcgtccttcgtagcgtcaatggcgcactggtagacgtggtagtattccgtccaccgctccctgtcgtccgttgtgcccccggcaagggggatgcggtcgatgttgcgctgaagccgttccatttgagcgtttatcttatcgccctcggccagccacgcgaggtcaatctgccggtcggctacattcagtgcctcgatttcggcccgcttgaccagtgccgagtcgatggcttccgcctcgtctgtctggttgtacaggttcacacccgccagcgtgcggaacgacagtttgttcttgcttgccgccgacttcttgtacttgttgtgcagcagcgtgtaataaagttcgggcgacagagcgcccgtaccggtttccataaccgtaatctggttctgtttcggcgagtcatggttgtaagtaaccgactgcgccttgacaccgctcgttgcaactgctgcaaccgccatgagtaagagagttctgttcatattaatttccggttattcattattttacagttatttatatcgtatagtcatactttttttgagcttcctttactgtcataaatattggtattcattcctgactcgtttctctccttgcgagaaatatgtctcgtctttttcaatgcaaatacattttctattcgtatagatacaggcaattgcggtgctcatgctccccgaagcaaaatcaaggacagtatctccttcctttgtgtatgtttttatcagatactccaataatgcaatcggcttttggttgacatgaatcgttttgccttccgattccgctgttttgaagtatatcacacttcgtggatatcttgtccctttgttttcatgcctgaatgtaggattgggtacattgtttatccctgtccaattgcttcctctcttcgtgcggttcccgtaaggctcgccttcctccatgattggataataaggggttctgcctttgccaaagacacttattagctcatgtgcttttagaggttgttttttagcgagaagaaaattgcttgcttttgacttttcccaaacccagtcatatttaaattcatctaaattgccgcagcgtagaaagctgctgaacggttcgctgccaaataagaccgtaggtgcattttctttcctgactctcctgatctctttccacatttccgggaatggtattattttatcccactgtgaagctgtaattccaaaagggggatcgcataaaaccaaatcaatgcttgattccggaagaaaaggcatcacttcaagacaatcggccttatataacgtaatgtcttttgcaaaaacaatcttttccattgcatcaatctgaatgtctttttatcccttggtataatcccaataggcttgtttgtactaaaaattctttctctgtttttatttcccgatgtcgatggcatggaagtcaaactctaacctgtagatagtttgccttctttcccttttatcgttcgttaataatccagccgtcccgctttgcgccatcgtccgaaagccccgtcgataatctccttgaccttgggacggtaaatcttcgctttccagtaaccgatgcgcacctgtatgtaccgccacgtctcgatatacgcccggttcaggtgccgctcgatgtcgtccagcgacgtgttcaccgcttccagcaccatcagcaggtcggaggtcgaacattctgccgcccctgtggcatacagcacgaggtcactgaccgatttgtaaagctgtttcccgtcatcggcgatgtcccgtattgccttttcgttgatggccagtatcacggcatcgccggggtcgatgcgcccccgtttcacgattctatcgttgaagtcctccagcagtctcttgtaatcgccgatacggtcgctgaccgccgtataggtgcttttcacgttcagcaccgtccgcaaggactggtacatcacgtcgatgacgtcgaaggcacgggtgtagcggtccaagtccacattcagttccttgtactcgccgacctctttgcggctgtactcgtgcagcagcttgttgctgtattccagcgtactgcgggccagcagcaggctgcgttgcttcttgtggtcgttgatgtaggcttctaccgacacgatgtcgaacgtccattgcgccttggcaatgccgggcaggagagccagcagcacgactgccatcagcagggcacgtttcatggccgcacctcctttccgctgcctttgccgttcctgccgtttccgctccgcaggttccgcgcattctccacccagcgttcgtggcattcctccacgagcgtcagcctgcgtccctcgtccatatccaattcgggcagcacgtccttcagcacgtcgatgatgctccgtttgtagtgcatcatcttctccagtgacacgaggtcggcatatatcatcgtaatccgggaatccacttcccgtgcgatttcgagccggtcgcttgaccacagcagatggtacacctccccggtcggagtctcttccaatggtggggtacgggcatattccgtcgtgatcttgcacgaaggatgctctcgtgcaatctccgcaatacggtcgttcaccagtttcgttttctccgcgtccgacaggttagggtcgagcgtcagcacgtcggccacatacgtgtcggtgtattccgtggtcagttcccaactgatctgcacgatggcacggtgtatcttgataccgaggaaatatttcggtttgcgggctatcgagaccgtcgccttgaacgtgatgaccccgttgatgttcggcatggtcgccttacggacataggtgtagccgttccacgccccgccgtcctgccacgacaggctgtaagccgtcttgcagtcctgcatgatggccggtatgcggtaatagtcgtctgttgccacatcgttatcgcccgacgcctcggttttcgcgtcggtgtattcccgttgtttcttctgccattcggacagctcgcttttcaggcggtctatctgtgtcttgttcgcgttgtactgctgccggtacaccgccgcatcttccacgcttgcctcggcgatttttttcagcaggtcggcattctcgctctccaacgcgttgatttgcgactggatggcggctacctgattctctgcctcctgcagcatggcgtccagctcggacaagtccagttcgttctccgtaaccgtggtctgcatggcacactcctttgaatgggcgttcagggatttgccgcacgttcggcacttgtactgcgtcgtgccctgaccgagcgtagccccgtccgaacaggttacactgatggtcacgctctcgcagccttgcaatttcgcggcgtccgtcgcctgataatagttccgcgcgtcagaagctatataataggtataaccttcctcgttgtcgttgaactccgagagtcgggcgttaagcccggctttgaacgtgttcaggtccatcgagtaggaatcgaacacctcttcatagacgacctcttcccggttccagcttttcttcacatggatttcgtaggcgtatgccttcttcgtctgtttgccgccccggctgatgatatagccgttctgccagtagttgatactataggtatagccgtcattctggttgttgagctgctgtacccggcttctcgaccaaccggcgtaccgttccgaattggcgagcgcctgctcccgttgcgaggcattgggataaaagtcgggatcggttgtctcgaaacgcgtccattcgccgccgttcagtatgctgttatcgtccgtcggcgggtagtagtcgcacaaggcgatactcccttgctcacgccgggcgatataccaccgttgcgtgtagtagtttcccgccgtctcgtccagatagtccgtcatccaggaggtaaggtcgtagttgctgaaatcgaacagtcccgccacgttgtcctcaccgcccaccatgtcaatcagcaggccgccgaggtcatgctccgcctgctcgaagagcgcaccgtaatggtcatacaggtcgatgaccttgctgaccctgccgcccatcagctcatggaacgaactggtttgcaacagggcgtcaccaatgttcccgatacctgccgaggcgagaccgacacccatgttgtagaggttgtcgatgtcgtgttgcaggttctccttggtgaaattgcccggcacgctggcgatgtcgtccagcatgtgctgccagtcgatgtcgcctatctccgagagtttcaacagaggggcgatgttccggttgatttccagaaacacgatgtccgaaaagcccaacgtgctgttcgtcactacactctcgaactgcatacacaggcttttcgtttcgtcgcagattttcatcaggtagctgccccagtagatagccgtttgcggtgagcggagcatcagtttcgccaccacccatatcttgggtatgatcttctccgagaccatgcggtaaatgcggcggtagtagtagttctccgtactgctgttccagataccgaggtcggaaaaggctttatgctccaagaacttggaggcaaaaatccccgccgtggccacttccgccgcattgtagtgcttgagtatgtcatcgacctgctcccggtaatagctttccgccacggcttccgtaccgaaagcggtagccattgccgccacggtacgcgcatcgtagttcacgctgtaatactgcgcgtggatgtgctgtacgacaacgagcgacaggagcataaggataagtgacagccgtttcatcatggattcctccccggttaaaaacagcccccgtcaacggcgcgtcatgcctcttagtgcacgtatcagttcgtcggcctcatatacggcggaatttgccaccagacggtggtgtatgaatacctccttggctatctcgtacctgcgttgttcccacttcgcctcttcttcctcgtcctgcacggaatttccgataccggcgtattcgtccagttccttaccgggcattcccaaccggagattgtacctttccagaacatcctctatttcctcgatgctttttcttcccatgtcgcgtacccttaccaagtcctttccgggccattggcacaaatcccggatggttttgatgtcgaactcacggaatatccgttggatacgggcttcatatttgctcccgaactcaagtgtcttcacgctttggctgatgtctatcttttccattttctgtaattgatgatttgattgttattgttttacatgaaggttcaatatccgcccggcctcgttgaccttttgggcgaacggcagggattttccgataccgctggcgttccaatcccgacagtacgcctcgatagcttcctgatggctgcaccgcaattcccgcttgtagagtttcagggcttctttctccgcccgctcggtggtgtaggtcatgtaacactctcttggttcttccacgccgtacacgccgctggtcgtcccccggcggatgaacacctctcggaagaagctgcgcccttccttgttttccagccggttgatggtgaatatctttttgcagtccacgtcggtaagtccgagaatagccttgatttcatcgaaccgctcgcggaacttgctctggtcaagcagcatcaccacgtcggagttgttgatgatggcttccttgacgatagggctgccgatgatgtcctgtatctcctgcgtcaccacgccgaccgaggcccagaacttacgggccgtcttgtacataaacttgatgtattcggccatgagcgggctggcaatggccttccacgcttcctctatgaccaggactttgcggttcttcttgatacgcatcttctgtaagaatacatccatgataatcagtgtgacaagagggaacaggagaggatcatcctttatactgtcaatttcgaagacgatgaacgtctcatcgaacaatgaactgtccatgttctcgttcagcgtcttttcatgattgccgccccgatagaagtccttcatcatgtaacggtacgtcgatatgtcgatgcccgaaatatggttttcggcacagatgtcggggatgcgctgcacggaaaattcatagaacgagttgaacgacagctcttccactttcaactccttacggcggcgttccatctcgtcgatcatgcgctcgatacgcccggtccgctctccttcgtcctcgtcctgcttctcggcatggttacggtcgtcgatgagcagccccttacgcaaatcctcccgttgcaggggtgtgaagccgtcgaacccattgaaataagtgtcgtaatactccgtgatgacctgttctatcaggcggtcctctgtctttgtgaccgtaccctgcgagcctttccagatgagcagcacgaggtttttcaggaagcccgtcttctccacattcatttccgcccgattgatgcggaatgggttcatcgtaatcggtctttcctcggtataggaaatgtacttgccgccgaggtattcgcaaagtccctcgtagctgttacccgtatcgaccatcaccacgtccgttccttgctcgtacaactggcgcacgacagagttcatgtggaagctcttgccgctgcccgaaggaccgagacagaaaaagttcgagttgtccgtcagcttgtttttcccctcctttcccgtgatgtcgatagccaccggcacgccttggcggtctgtgtagtagattttcagcggtgtctcctcgctgtgctgtatgtgctccttatacatcagacacatcgccgcgtcacccagcgtcaggaagcggtcatagtcctcgttcatgccgtaacagttacccggaaacgagttcacgaacagttccagttggttgtacgcccttttggaaatatggatacccatacgtccgaaagcattctccaagtggttcgtgcatttttgcaggtccgtatcggccggtacggcgacgatcaggttgaaatgggtgtacacgagctgcttgctttcccgcgcgatgacctcctgcacccgcttgatgtcctccacggccatctggttgctcggattgggaatactggcgtgccggttcttctttttgtccagcagggccagttcccttttctggttgggcaggaagacaatctggttatagacgaccgtctccgcattcggaatgttgtcgatggcagccagcaggtccacgggcatatccgtgttattgacctctatattggtgtaaggccgtatcagtgagggcagtgcggcacagtccacatcgacaaggctatataccttgcagcgtttgtcgcccatcgagaccgtttcgtcgtccgccttgaagttggtcatcgacacgatccgctccttgaagttcatggcgaaatagcggtccacgtattcgctcgcttcggctttgttcaggaacctggcctgtaccccggcatcgtgcagctggtcatgcactttgcgtatcttgaccagaaagtcgcgccacttcttgttgtcgaacgagaacaggcggctcttcttcgcctcctgcgtgatggtcaggtaacacacgctgtccgtatagttacgccccttgaagtaacggaagtaggccgatgagaggaactcgtgtttgtcccccgtctcgttctcgaactgtttccggatgaagatgtcctgtttgtgcagggcatatccttcgccgagcgtctgcgcgagggcggtgaaaaggtgcgtgaactcgtagtagctgtcgatgttcgcacagtatttctgcacgggattctctattttcaggatggctgaatattcgcccgtcttggtgtacagcacgcccacgccgttcgtatcttccacagaaaaatagatgtcctgaaagatacgcttacgcttgcctccggtaccgaacgcatagaccgacagggccatgccggcacacaaggcgataaaaagtagaatgatgtacaaggtcatttcaaaatacaataaaaaaggccggtccacccggatttcaggcggccggcccgcgttcaacattcaacaagaccacacgttgcccgtgatggtttttcttttcttctcacagtttcttcgagtgggcgtagatatacactccgcgaccgtctttcttggtatgcagccctttccgctgtttgagcatgataagcgcaatacccgtcgagacgaccgcaaccagcacgaccagtccggccacgaaacccacgaggcagtaggcgatgataaatccgacgatggctccgccggcaacgcccgccgcccagtagatgtagcgtccctgaatacccatgaactccaaaggccgttgcaggcccttgaacagcgggtagtcgggatagcgttcgtccttgcctttcatcgtgcgggagggttatgcgccgataccgaagaacatcggaagtgcttgtgcggcagcgattaagaaaatacatgcgccaacgatcatcataatctttttcttcacgtcctgttcctcgttgttcatggcgatgtacaccgagatagcgcctacgatagccactacaccggcaatggcgtaacacagtttgaccatgacggggacgtacttggcgatttcctccgtcacggtcgccagtgcggtcgtaccggcggagtaatcgcctgcggagttttgggccatgacggccgtcgtgccacacagcaacatcagtgtgagcatctgtacctttttagcagaaaacattcttttcatttgtctttttgttttttgaaacatgattatttattttagggtaagtattgcagttctttcgaatcgttatggcggcacctcattcctgcatcccgtttctatatgcgatagccgaaaaaggcaggaaagacaaggaaggcaccgatcaggaacaggcacgcgcccacaagcgttacgacggacttggtaataccgtcctcgcccgtgttcatctttacgtaaatctggaatccggacacaatcacacaaatcccggcgatggcacaacagagagcttggacgtagaacatcatcgttaccacgtagtcgtgcatcgtcgccagcgcatccgccccccaactgtaattcacgctgccgcttttcgccagagccgaacaggggatgatggaacaaagcgcacatagtatcttcttcgttttcgacatcttacagcttatctttgaccggtctccatttcaggctgggacggttgtccaagcgtcctttggaaatcattgccttatacatctcttcgtcggtaaagccgtcggacaggtagggtgcgaccttttccatctgtgcctctgccttggctttcagccgttcgagccgatccttggctgttccatcttttttcccggtgtcgccgttttgggcggcaggcgaagcggcaggtacagtctccgtgccgtatgtttcatttccgattttgaacccggtctcgttctccgaaacctcgacactctcttccgtggaatccatcggaccgaggtcgaaaacttcctcgtcagtcttctccgttcccttctttccatacaggtcacggatgatattgaccgcgaaatagacgatgtacagcaccgtcagtacaagggcgaatataaagtatgaacccatctgtttttaagtatgaaattaaactttaattgaactttaaaagtacggttgcaaagaaaaatattatatttgatgtaacaaaaactctttatatcaaacagtattttattacatagaaataagtttgaaacactaaaattgaactttaatttcatactttgaggtatcgaagcagaaaaatcgggcataaaaaaagccctccgggaggagagctttcaagggaaagggtaacgatgatgccttaccgtttctttccgcgtaggtaatcgttcaggtccttgtattcgcgataacggggtgcttcgttgcgtacacgcccgccatacatgccggcgatggtctcttccgttttctgccctgcgagatcattgtcgagataacagtggatttcctcgtacacctgcaagtgttccaatgcttttttcaggttgttcaccgagttcatcacgaggtaatcacaaggtgcgtcgatgcagaccgtatcatcacccgcctgtttcagcgtcaggtaagagagaaaatccatgaagccctcgaacacgcaaacacggttctgtgtttcaccatgagattgcctgatgacagagatgtccttacaccggatacagcccttataataaggattgcgcacctcgtacccgcccgccgcgttgccgaaggcaagagcgaagtagcgccgtttacgtaattcataatggacctcccggcagaacatgcggccgatgtccccgtcgattccacgggaatgaaggtacgagagtagcgcatggtgctgcaacggcacgacgagcacgtccttcatgtcagcttcgacgggacggggtgttgtccccggaatccgcactctttgtatcggggcagcattttcatgtctcccgatacaggcaagcacttcgctcacgctgttcgtccggtacaggtatttgcccagttccacaaggtcgccgcccgtcgctgcgccaaagtcataccattcgttgagccggtcgttgaccttgaacgacggagtgcgttcatcgcgcagcggtgacagataccagtattgttttgatatcacactctggggatggtagccgagactggcgagatagtccacgatacgcagttgttttgcttccgctatggtcatgtcattttcttttcacttgttttcaaaaaacagtttactttggtttttctcctatatatacccggaccaaagtaaactaaattatttttcaccttccgcttcctcgcattcttcgtcgaaaagcagggcttcggtcggggtcacatcgtaataaaagagcttgtcccgtttgacgatcagcttcaggttttccgtcaggtattgcagcagttttatcatgacgctgcgtccccgtttgaacccgatagcctcataggaagccatgagggcctgcagcacgttctcgaaacctttgatgggcctgtccccgaaagcggcggaaagtgcctcccggtgctgttcgatggacaaatccatgaagctgctccgggctttcggtcttacactgccgtcaaacgaatagttatccaccatgaccggcaacccttcgtcatcaacggaaaaggcgaacggtttgaactccttctcgcggatatgcagcgcatgaacttcactgataacgggattctccgcacttttggtgatgaccagcaccgtttccgccttattgctcatttccgtaccgatatgcccgcgcacattgttgtcgcccttgttcaggtgtagcacacaatggatgtgcaggtcgtatttcgacgaccactccatcatcttgttgatgacctccaccgattcgctggtgctgttgatgtcgagcatcaggtcgcggatgccgtctatgatgaccagcccataccccttgttctgacgcagggcatagtcgataaccccgatacggacggcaggagtgtattcccgcaggcaaatgaaatcgagattctcgttgtccgtcgtggtgggcagccccgccaggcggagaatgcgttccaatacgttgtggcaatggaaacggctctgttcagtgtccacgtacagaatcctgcgtttgccttcgggcaggtgcgcccgatagttcaagacctgccggcccgccagcgacgcggcgacgatggccgagacgttgaacgtctttttcgccttcgccttacccgtcgaagcgctgaaattaccgagcgtcgctatggtggagttgtcaatccatataatctggggcggagtctcgtaggtgtccgtggcctttatttgcgatgcagtgaggatatccgacaggcggttctcgtccagctccgcccacgagttacggtcagttcttttttcgttttccatagcgcttctggttaaagaacggttgggttgcggacacttccgtcgccatacgcatggcatcgtccaccgtaggttcgtagttttgcaagagccacgcgtccagctcttccttcgcaaagtagagcatcttgccgcgaggcttgtagtgcgggatttccttgttcgatgtgagtttgtacaacatactttcggacacgccgatatacatgcacgcctcttgaaaagtgaagaccttcttggtcgtgtaaatggtattttccagcaaagccacacgctccaacagaccttccaccggttccaacttcttgagaaccgcttctatggcggtcagccgttcgctcaaccgctccatgaatgttgttctgttttgcataaaatacatgttaaaattagacaatggagagttacctccgttatgcagcgcgctaacggaggtcaaagttatgtgatgtgaaccggacagccggaaataccggcgtgatactatgcacgtatcacggcaactgtcactgttttatctttcacatacttggctttttggcacttcgtgtcatattttcagtcggctgacggcttttcgtatgccgaggtttgccgatgtaatgttgttcctcgccgcagacagggcggacgagaggcttgaagcggtaacgtatcttgtgccgtctttggacaacaggaaccgccccttgtcgagaaccgactgccagtgaggcaggatgaaggtgttttcgagcaacgcgtcgaacaggaccgccacatggcggatattgttcacacgtatgcagaagcccttcttgcaggcaaaaagcgcttccatgtcctcgatgcggagtgtggaaacgcaaaacagatgataagcgttggcgcaagccacaatacctgtcatctgttcacgggaaaaattacaaccgaaggagagaggtggatcgtttctggaatcttctatacgtgaagagccgaaccatactccggcaatgtcgtactttcgtttcaaggccatgcactcctcgaaagaaaatgtttctgcggtaaagaggcttttgacgagacttgtgcaatcgatcaacagccctctgatgatatggatgttcatttcatggcaattcctgcaaaccgcactgttgcagtcgatgtaccggtgactgtttataaagtcatccacatagcggccataccgtttgccgcctgccatgacgtcttgaagataaagctccctcgcttcggagagcaattcgtaaaattcttccgctacatcctgttccgtagcgaagtggtgcagatgtggtctcccttcaaaaaaagagaggacctgttgttttgtcctttcatgtcgaattgtttttatgggtttatacttattataatagtggcattacttcgactatttgaaaagtcggagaaaagccggaaatatttacctgtaaattgaatttgacatgtataactacatcagtcgaatagcccgttgaccaaattgactgcttcgtcttttttctggttgatgattttggcgtacacctgtgtcattctcacggaggtatgaccaagcagcttcgatacggtatagagatccgcaccgagcgtcagcatcatggtcgcgaatgtgtgccgggccgtgtgaaaagtaaaacgcttggtgattccggccgcttcggcccacggcttgagatactggttgatgtttgaaggcaagctgaacacatggtcatccgccgccttgtcctcacgctccggcatccacttcaacgcctcgttggagagtggcaggtaaatcggttctttggtcttctgcatagccaccgccagacggtattggccgttatcgacaaagacattcttccatttcaggccgacaatatcgctgatacgcagtccgcagaagcaggaaaacagataggcgtttttaaccctcccatcctgtaccggagtggcaatcaacgcccgtacctcttcgatggtcatataggaccgcacgctctccggcattttgggcttctccgatttttccatttcattaaacggatttctcaacaaccgtttagcccggacggcagtgttcagggcaccgttgaatatctgataataggtattgcgtgtagatgctgctatcggctttcctttagggcggaaggtcgtcagcatgtagtcgatatagccttggcaaaaagcgaggtcaacccgatccaacaaaaacctttcccctgcatattctttcaggatatgggtaacggccttgatttgaccgatgcctttcttgtcgcgtttctcttggtactccaaataggtttgcatccagtccagcagataaaccttatctgtatggttcacgataccggcttcgccgctggtcagttcgataatgcgtttcgacttgatggcattcgcagcggccattgttatttcattctgccgacgggtattgttgtccgttcccgggataagatacagcttcaggtactcatatgtccgcttgccattgcggtatatatccagatacagacttttgctgccatcggacaaatccttcatccgaagacggatgggctcttttacttttttaggcttctttattcgtggcataatcgtattctttcattcgttctttttcgtatgcaaatgtacgaattaaaaccgaaatcaagaaacaaacaaggaacaaaaatgtacccaaaaagaactaattaacagaaaatagcgaaaaaaactgaaagaaacgatttctttataaatgtctgatataaagcctatttgcttgtacttatttggattttattttcatctttaatatgtctgtttgtttattgaaaatattcctccaaaaggagtgagtttctcggatttaattgctacctttgccatgtctgtcgggtttgatacatattttgatttgcaacactaagataggtgaaaaatctgacatggcaaattcctgagcaactttttgttgctcaggtacttaaaaagttatatttgtaatagtgttgcggaattaaggttatcttataatgatgcagacagtaacggacacaaagaactttgtgtaacattggaaaaagccgctttaattgatataaagttaggtttctttgcatcaaacgttatcccattgcttcccggctggactggtggcgtgtggctggtggcacctgatcgggcggtggtctttgatgataagatggcgcgtataggtgtggttatgcctgcgtttataaatgattctatttgcccgaacctaaaatgtaatataaaggctttggatcgcgccaaagctccgatcatcacggaaaaagaaccggtaagagagccggaaaaacatttaccggccttatatgtggatgcacaaacgaaaacaccggcgtttgtctttgctttggtagctctgatagattttatttcccgttggttttatcaggatcaaataaacaaagcattacagaggctaacaatgttaaccgaactatccggcatttctttgcctgaactattaaccgaaccagtaagcgaagaaacaaacgcaaatgtacccgaaccaataacagaggatgaaccagtacgcgcatacacacccgaactattgtatattgatcggcctttggttttcccggtgcctatcttcatacataaacatgaacgaactatcagccgaaccgttgtgcccgaactattgaatcaccaatgtatagcgttactgtttgtttccatgatgttgcccgaactattacggcgatatgtttggggaacaatccgaccaaaggcaaatgcagatgaactattttggggagatttcagacgttttcacaccaaaggtaatcatcgaatcagagacggaacaaaagaggcaaacaaacctaaattacagccatttcaaacgaattattacatatatcaatgaatcattatggaagagaataaacaagccaaaagaagttatcgccgaaacaaaccggttacgaaaagtaaggtctatgctattagactggatattgatttggttgattttgtcagagagcaaccgaacatgagtaaatttattaatgaactgatccgaaaggagaaggaaaataccctaaagtatgaatgaaaaatcaaaagcttttgaactgatagaatttgtttggaacaatgaaaagactgattcttatttacgagtcaacatagccatgtatgaagcagtaaagttggctataatatctcaaatgaaattcaataaagaggattttcagaatatattttcaaaattcagcggtggttactggtttggagtcaacgccaacggtaagggctatggtgaaaatttctatcgggaagctgttacttcgggaaatatttcagcctgccaaagctatgaagcattctgcaatattaaacccttcatagactccaaaggcagaaggttatgcaaaggggcaatgtaccgggataatgagaaacgttatagggtgacgggatttgatttcagcactaaaaaagtctatttagtaggttatgccataagtgattgggaagaaaaaggcaaaaagactcttttcaactttaccaacaacgaatggaacgaatttagaaaacaaataaagcaattttagcataattatgaatcaaaaagcaaaagattatatcagacgtaacactttggatttggaaagtgacaaccggatggattctaccggctatgtgcaatatgccatatcagaagcaaaagcctatgcagcaatagcgatagccgaagaaggaatgagacaaaaagccattgaagcattcaaatttgccgttgatggttattttataattggcggtaccgattattcagccagtagattaaatgaatttattaaaaaacttgactcttaatatttatgagaataataaaattcagaggcaaaagccttaatacaaagatgtgggtatatggtgatctgaaccatagaggtaaaagaacattcatagagtatgaggttgattgcaaaacaatcggccaatttataggcaaaacagataaagaaggtacagaaatttacgaacatgacattattagtgttaatggtaaatatcccaaattggttaaatacatagatgaatatacctgcttttgccttgccaatatcagcgacttaaataaagaatggatgaacccatggcaacaaatttcacctgattggtggaatgatttcaaacgggaaattcgagtcataggaaatgcttttgataatcctgaattgatgaaagaaggagccaaccatgaatatgccatatagaaccagtcgtgactatcagcttcttaaaaagctactggatgaaggaaaagagatcgtatgttttacagactttccgatagataaccggattttccgcgatgtttgtaaagcaagaaaaataggagaaggccgatactctgttacttgccgtggttgtgaatatgcttcattttgggaaaatcacaattacaaatggacgtttgaagatgaaatgcggatggctaatatagaatttattgaaccaaatatttaattgatatgaaagctgttataatatattcaggcaaaggcggcgtaggcaaaaccacaacaaccgcaaatatagcaagattgcttgcaaaacaagggaataaggtgtttatcattgatgcagatataaacaccccgtcaatgaacaccgaatttgaaggcgatcatccgcatgaaatgatttgggtacactcttctggaaatatgttttccaagtttatttacttggaaaaatcaatggtaaggcaatatcttgaactggctaaaaaagaaaatacactctatcaacccggattatgttcttattgacacgcctccaagtgttacaaacgtgcatatagaacttcttagtagggtaaaagtaagttatgtgctgtttgtcacccaacccacgaaattaagcaaccaagatgtattgcgtacaatggacttctttcatgaaagatgtgggaaggttaattgtggtattgtggagaatatgtgctacggtacagaacataatgaatacccaataagacttgttgcacaaatacccatgcaggacaacatgaataccgaaaacctgctaaccaatgcctataatgagtttcaaaagatagttgatgaaatcgtacagactgatattgttgttcttgaagaatattccaccgaaaacggatatgatgaaaactttgatgttacggatatacacattaccggctcacgaaaacattactttacccatgaacttaaatatgataatggtgtagaaaaaactcttactctacctgctatgaaatttctgtctgtaagaacatgggataaagtaagagattatatccggttccatgatgatatgggacatctttgggacgagagaatgagaagatgtgatacagaaagggttggcagagtagtaaatcatttccaaaatgacgataacgcctattttatggttataaatgcgccaaacacggaagttcatctcattaccggagaaattggaatctgttctttattgaccggacagagagggcattttgaactaccaagagtaagttatcaaacaagtaaaggaaacgtggtgctgttccctgatgaaatcatgccagtagatataaacttgctacaacaagaaataaatgaaggctatataatgttaagtgacgggagatacttaccaccgaaagaagcggtacaacaatgttacaacgctttcggcataagggttggcttaggtgataattgggaagatatttatgatggttggaataaagaaatgaaataaaaatgaaagacttacgcatagcattcttggcaaaatacccaaaatatgaaattatactcaacatgtatagtcgggcaaatgattgcccggcaacatgggagaatctttcaaaagtccgattgcaggcttttgttgattatatggaagaacggctggcaccaaactctgttcgccaatatgccgccaaattaaaagctgtattgaacttgtataatgaagaggttgagctacctaaagactataataaaatcctttcggtaaaaaatgtgagaagcactaatgtttggcttactgatgaagaacttgaacgaattatcacctatgttcccaagaatgccaacgaacagttggtgcgcacacaatttttaataggagcctttaccggttgccgtcatagtgactatacacggttgaacaaccgtaatatagtgggtggaatgatctcttatgtcagcctaaaaactaaaactcatgccacagtgccattgaagccaatcgtgaaagagctactaacaaatttgcctaaagaagaagttagtgatccgacattcaacaataatatccgtaatatttgccggaaagcaggaatcacagaggcggttaaagtattcaaggccggaaaggaagtggaaggtgaaaaatgggaatttgtttcaagccacacggcacgccggagttttgcaaccaatttgtatttacgcggtgccgatttatactcaataagccaaatgatgggacatgcaagcgtggaaatgactcaaaattatctttgctgtggtctccgtgaacaatcggcacaagttatggagtattttaaatgaaacaagccacgctaaatatcggtagaactattttagcgtggctctcttatactatgacaaaatccgttccagcatctcaaagtctttttccacttcggcattcagaactttagcatattgttgtgtggtgcgtacatttgtatgaccgagcattttactcacattttccattttaaccccattgttcaggcacattgttgcaaatgtgtggcgggccatgtggacggtcagattcctatcaaatcctgcataatcagcaactattttaagtcgcaaattgtattgctggttactgatcaccggcagcacataatcatattttctcaatatttccattgcaggagacagtaatacgataaaatagttttcttctgtctttaaacgaatatccaatataacatacttattgccgcgtttttgtacgtcacgtttgaaattgaatttagcaagatcagcataggatattccagtatatgcctgaaaaataaaaaggtcacggactctacagatcgtttccgagtctatttgagcatctttcactttcttcaattcttcggcagtcaaatatttcctgatggcatgtttgccacgggaaaaacgctcacccttatacggatcattttttagcaaatcaaactttatggcctcgtggatataacgtttgttacgtttatgatagttatatattgtcggctgtgaatagcctttagcatgtaaccaatcatcatacaatgtgatattggcttttgtgagatcagaaaaatatattattctgtcaaattcacgtaatgaggccgcaaatgtccgatgggaagctttggtactttccgttatatctccacgctcttcaattcttctttctacaaagtcaacaaaactttctgatttattggtatatctcaaaaatctatccagcttatcaaaatcaaaaacttcctttttgctgataagttcattaatccaattttggataatccggagttgttcatcaagacactggttcaattgaatcatttcaaccgaattgattatcttctttcgatcattccattggtcggaatagactttaacgccggttccgatccattttctcttaccttcgctcaaaacttcaatttgaacgagtcccttgtgtgtctttgtcgcaacctttttacggtcaaagacgaatctcattgtcggatatttcatattcttttgagttttggtatctactgattatcactacaacaaaaaaatggtatcaaaggcggtatcattataggtgaaaatatcggtaaaaatcgggaaatactggtaagtttccggtaaatatgcacccaatttttatatgttctccatctactttcaatgccttaattgcttgatacacaacaaaaaagggagtaactaatgttactccctttcgcggtgcgtacgggactcgaacccgtgaccccatgcgtgacaggcatgtattctaaccaactgaactaacgcaccattatttcattctttcgttgctatctctctcgattgcggttgcaaaggtagacaaaattcttatatctgcaatagcttgaaagaaaaaaaatcatcttttttttaacatagcttgattataagagatttatgttacctttgcaaaactaaattaatattgaaatcatgagaaatactcctattgaacgtaagttgatagatgaaactatcgcagattttcatatcacagactttgccaaagcaaccatccgtgaagtaaaagccattgcagccaatgccgaagcggcatcgggtgtggaattcataaaaatggaaatgggtgtacccggactccccccctcagccgtcggcgtaaaggccgaggtggaggcattgcagaatggtattgccagcctctacccggacattaacggacttcccgccttgaaagaggaagcatcacgttttatcaaagcctttatcaatgtagatgtagcccccgaaggttgtgtaccagttaccggctccatgcaaggaactttcgcttcattcctcacatgtagccagtgcgatgagaaaaaggataccattctcttcatcgatcccggtttcccggtacagaagcagcagttggtcgtgatgggacagaaatatgaaacctttgacgtatatgactaccgtggcgacaagttgaaagcgaagctggaaagttacctcagcaaaggcaatatctctgccatcgtctattccaatcccaacaaccccagctggatttgcctgaaagaagaagagttgcgcatcatcggcgaactggcaacccaatatgacgtcattgtgttggaagacctcgcctactttgccatggacttccgccaagacttgagcaaaccgttccaagcgccttaccaaccttctgtggcacactatacggactattacgtgctgctcatttccggttccaaagctttcagctatgccggtcaacgtatcggtgtcagctgcatttcggacaaactgtatcaccgggcctatcccgggctgacacaacgctacggcggcggcaccttcggcacagtattcatccaccgcgtactctatgcactctcctccggcaccagccactctgctcagtatgctcttgccgccatgcttaaagcagctaatgaagatcaatacaactttcttgatgaagtgaaagtatacggtgaacgtgcccgccgcctgaaagaaatcttcttgcgccacggtttccacttggtatacgacaatgatttgggtgatcccgttgccgacggtttctatttcaccatcggttacccgggtatgagtagcggagaacttgcgcgggaactaatgtactacggtgtaagcgccatttcgctggtgaccaccggaagccatcaagaaggattgcgtgcctgcacttcctttatccaagaccatcagtacgaccagttggacgaacgtatggcgatttttgccgagaatcaccccatccaataaaaaatatccctatataaataaggtatctctaccagttgatgccggtatcccaccacaatcgggaaccggcattgtcatccccacccagtgcctctaccaaagcggcatactgctcggcattctccgtcttcagtccgccgggaaagttcagacggcgaatcattgtctcagtatctatgcacccgtctttactgtgattaaagcgtacggggaatagccggggataccccgtccggcgctgttcagcccaagcctcacacccttcgggaaacatggcaatccatttttgggtaataatcttctccagtttcgtatccctatccgctgactccagccagcgtggcgaaacttggcaacgggcggtaatatcattctccatatcgtaggtatccacaaaatcggcaggcaacaagtcgctctccagataagcgtcagactgcaagatgccatactgacggaaagaagccattaccccttcttcatagcaggttttcgccgactcatcggtccatccccgtagggcagcctcggcacgcaggaaccagacttctgctgccggcatcaacactgcatcagtctgctgggtgactttcaattttgagagtgtattataatagttatgtgcaaagcatgtaccctgacgaatgccgcgatactcgcctgcaaactgttcattctggcaagtggcaaaatagatttcacgacggggatcttcatatccgttcagtatggactccatcggcgctcccatataagcttcattccaaacaaggtttatctcgcccaacggattggtatatccactcgccgtggaaaccgccaccgactcgtccgcctcccgaatgactccgtattcattatccatcgctttacggaattccgtttttgccttctccggactggctaccgcaatgcgcatggcaagctgcatccgcaacgaattggcaaactttatccaagagtcataatcaccgtccaacaacatatcgaaacgcgcaaactccgaagctcccggatgctcgacaatataatcggaaagtacagcaacagccgtatcgagttcacagaaaaaggcactatagacctctttctgcgtgtcaggcatataacgggcttcgggatcggcaaaatgactatacacaatagggccgtaatagtccgtgacacggtgcatcacttccaccttcagtatcttggtaatgccgaaaaaggcaggcatacggtcacgtgtggcattctccgactgatatatctgcgggaaaacatactcataggtatgtccccacatggcgctgttccatccatcctgcaagttgtagtccgaattgtgcgaacctccattcagaggcttggcatcgtgcatgtaaccgctgaacatgtcggcattcaaattctgggtcaattgaaaaggccagttcttcccctttccgtagtcgtaattgaaatagatgccttgctggatgattccaagacggataccatgttcgttatagtcggcctgcaagtcctcgtccgtcacgccggacttgtccgtattgatttccttaaagtctcccgtacaagccagaaacacgaaaaccatgccaatcagtactataatcctcttcatatcaagtctccctccccctcttaaaattcacacttcaaagaaaatccccaactacgcgtggtaggcataccgtagacttcaattccctggttatcgttgcccgtagagagtaccaggtcagggtcgaaaggcgcctttttgtagaagaagaacaagttgcgtcccgaaaaggacagttgtgcccgcttgaggactttggtcttttccatccaggcagcaggcagttggtagcccacggacagctcacgcagcctgatgttcgtggcatcatatatataatattccgtcaccccggcccgtccgcctacaacattcttataaaatcctttcacattatctatccggttaccttcaagcattacataacctttgtctctggcccgggccgtgacttcagaaacgccatacatatccatatccgcctgcgtctgggacaaaatatcgcctccaaagcgacaatccaccagaaaatagaaagaaaaattcttgtaagacagcatatgattccagcccagcatcagttttggattggcattgcccactttcaccgtattgccatcaccttccaccaaaggcatgccggtattgtctccttccgtgccgtaaacgatattgcccgcatcgtcacgtacaaaagcttttccgtagatgtcaccgatagagccccctttcaccaatttcatggcataactggacgagaagctggtaggaccgtaaagaaactccttcagcgcttcgtgcagtgaaattatcttgttgcggttggtggagaagtttacctctgttttccacttgaaatggtttgtcagcaaaggaacggcatccaatgaaacctcccaccccacattctgtatattacccgcattgacataacggtaggcatatttatcgcccgacagagtgggaagcttgaagaactggttccgggtattcgtcttatagaaagtggcattcaaaccaatgcggttctttaaaaaacgcgcttctatacccgcctcaaaggaatgcgtcatctccggttccatatccttgaacggcgcggcatcacttgccaggaactctccacccgccgtgatatgcgaggaaggatttgtgatgaacatgggaatatcattgcccaccatgctgtatgccccccttatctttgccagtgacacccatcggggtaaagtcatcagcttattgaatatcagcgaaaatcccacggagggatagaagaacccgcttttctcatgagatgtataagccagcgtggaggaccagtcattacgggccgacaaatcaagatagacaaactcgttgtagcccagttgtgccgtcgcaaacaaggactgcaattggcgccgtgcatcaatcttctggtccagcccagcggaaccattcatgatgatattggccagattgaacacattggcatatttcagcgaagctgttttagagtcatagcgggtggagttcactgtcttgtcattgatactggcaccgagcgccgcgttgagagagaatgcatcccactgctttttcatcatcagtatggcgtctccgtaatattgggtttcctgatagtccatctcgatataacgcccattggctcccgctaacgccggagcggtagaggcatagaactgctggcgcaccttgtcgttaatatagtctacattgccacgggcctgcaggcttaaccaatcgtttatcttcagattggcagataaggagactatgacatgcatacggttctccttgctcaatatgcgattggtaatccagtagggattctgctcaaaatcctcgtaggaggtatgccaattctgtatgttcaagtttctaccctcatcataaacctcgaagttctccttataataagcaatatcctcaccccgtggaaaacggtagagccccaccaaaggattcatgtagaaaccacccacggtaggcttgttcttcaccacctggcgcatcaggttcatactgccatctaacttcagacgggaattcaatagaacggaagtctctctgaaagtgaggttgtgcttcgaaaggttatgtttcccaatgatgccatgccccgtagtattggcataggagaaatagttctgcaacttctcattgccgtgactcaaggagatggaagttatggaggtgacaccagtagagaagaagtctctcagattatcatattcgggaaggtttgcccgttctccccaactgtccacaccgtcacttactccatagcggttctgcatcttgggtagtgcaaaagcattgtcgaacatcaggctcgtcgagaaagaaacactgcgctgcccgtgcgactgccccttctttgtagtaatcagtatcaccccattggcggcctgactaccatacaaagctgccgctggagctcctttcaggatactgatactctctatatcctcaggattcagattggaaatgccatctcctccgtcacggttgccggcattggccgttccacctatggcagagtatgcttgctcggaagtggagttcagaatgggaacaccgtctatcacatacagcggttggttgtcactcgccaccgagcggattccacggatactgactttggctgaggctcccagaccggaagaaacctgattaacacgcacacctgccgacttgccggtcaacgaagtaattaagttgggcatttttactcgcgtcaactcctcgttttttattaaatctgtggcgtaagaaagagaattttctttcttttcgatacccaaagcggtaacaataacgttatccagctctatcatatcttctcttagcgtgatatgaaaggtcgaacgtccttccacctcaatatcctgggaaatgtagccgataaacgaaacacgaagcactgcattatcggcaaccaccagagtgaattttccttccgaatccgctatcgcaccattggcagtttctttctcttgaatagtggcaccggccagcggaaacccgctttcatccagcacacggccacttatcgtcactttagaaagctgtatttcagaatgtcccggacgctgcatacgctccataaaatcctccgggcaatccgtccatcctatagaaaacagccctaaaattaacgtatataatgtagtatatttcattgcattaaattgccaattacttgcaaacttaagtattttctccgaataaaaaaagccataaaatctgagaaaagaaacttttaaaatgaaaaacagcgaagaacttttgtttattgtggaatattatgtatattaggggcatgtatagcaatataaatctattcaagatagaaacaaaccatgtggttcctgcccagggaaaggtcttgatttccgaaccctttttgtgtgaccatatgtttgggcgatccgtcattctactggtggaccatacacatgacggcacaatgggactggttctgaacaaaccgctccccctattcttgaatgatgtgctgaaagacttcgactgcccggaaaacatacctatctataaaggaggaccgctcagcacagatacgttgttctatctacacacgctcgagggcattaccggagcattgtccatcggcaaaggcttctacctgaacggtgattttgaagccattaaagactacatcatgcagggaaatcccgttaaaggcagaatcagattttttttgggatactccggctgggagtacgaacagctgggccgggaaattgaagaaaacacctggctggtaggcaaagaaaacatcagttcgctaatggacgaggcggccagcggcacactctggaagaaggcattgtgcaagctgggagcaaaatatgaaatatggtcgcgcttcccccagattccaacgttcaattagtgctgcggagaagttgcaacagtacgacatccttatagcaccctcctacgcgccaccactccctcaaaagcccacaacgcacaaaaccgcaggattcaaaaaggcagatacttgcctcattatccaccgagatatggactatcaactgtttcagatataggaaactgaaaacatagtcgcacagcaaacgcagcgcttccttggcataaccattgccctgatactccttccgtatggcaatacccacctctccccgggcatgcatgggagaaaactctgtaatatcgatggtgcctatcaccgcatcatcctctacacgtataatcatcatacgcagctggcggtcggcaaacatatcgcattcggaattctcaatatattgtttcaagacaaatctggaatagggtacggtgaagttcgtcacatcccaagtctgggaatcattctccatagcatacatcacttccaggtcttccggctccatagcacggagacgcaccctttcactgcagaaataggatttattcatattttccagtcggttacatttcttcttctttattgatatgcagttctttacgcaggcgtccctcacccggcaggcagaacagagaagccgtcagtcctatcagtgcacacagtgcacccgtactgctcaacatgatataataggtgaaaaagcctacaagcaccggtatggcaagcaatgccagccgcacgccactccacagcgcatagaggcggagggcttcgggaagcgtcactacatctattttccggattaatacccatgaaaagagtttcagggctatgggtacgcaagaggcagccagcagaatggttaccgtctcagccatataggtggtacgtacatctccggcatacatacctaccaatccgcctccggtttctccaagtagaacgagcaggatgggaagcatccagaaataggcaaaagttgttcggacacgcgctgcggtcttctttatttgttcttccatttagtaaattgatagtggataatgaataattgataatggccccaaacaatcaggcagttccggaaaatggagtgcggttcacaatactgcgtcccagagtcacttcatccgtatactccaattcgtcaccgatggaaatgccacgggctatgacggagagcttcacgcccagtttttccagcttgcggtagatataaaagttggtggtatctccctccatcgtcgtgctcagcgcaagaatcacttcattgatgccgccggcggctacccgccgcacaaggctttctatctgcaagtctccggggccaatgccatccatcggcgagatgacgcctcccagcacgtgatacaaaccacggaactgttgtgtggcttccacagccatcacatcgcggatgttctctaccacacaaaccacagaggcgtcccgttgcggactggaacagatacggcacgtctccgtatctgatatattatggcataccttgcaatatttcacttcatgcttcagcgtcacgatggcattgccgaacgcttccaccactgccgtatcctggcggagcaggtgaagaaccagcctcatagccgtcttgcgtcccactccgggcaacttggcaaactcatttaccgccttctccaataatgtagagggaaactgtccattcatacttaaaattctcctattggccacaaagatagtgcaaaccgaatgcagaataaaatgaactcgttcattttttatgctgaagtgcagcctatcttcgctttctgggcaaagatagtgcaaacttatgaaattagtgctacctttgccacacgtaaaaccccaaaaaggcaacaaaatggatattacaaacgctgaattcgtcatcagtaacacagacgtgcggaaatgccccacaggtacatttcccgaatatgctttcataggacgctccaacgtaggaaaatccagtctcatcaatatgctgaccgggagaaaagggctcgccatgacctctgccacaccgggaaagaccatgctcatcaaccatttcctcatcaacaagagctggtacattgtagaccttccgggatacggctacgccaaacggggacagaaagggcaggaacaaatcaaacgtattatagaaagttatatactgcaacgcgaacagatgacttgtctgtttgttcttatagatagccggctggctccccaagccatcgacctcgagtttacggaatggctgggcgagaacggtgtaccctttgccatcgtcttcacaaaggccgacaaactgaaaggcggcagactgaacacccacatcaacgaatacctggaacagttgaaggaacaatgggaagagctgcccccctacttcatcacctcttctgaaaaccgcatgggacggaaagagctgctggactatatcgaaagtatcaacaaaagcctgaatagcaaacaatagacataagtaaaatgaaaagattagttttttggcaactgtttgttgccgcactactgctgaccggcaatagtcacgcacaatccatcaaggatttgttcaacaaagaaaatatagagaaggcggtaaatgccgtgaccggcaagtcaacagcggatatgaccggcacttggtcgtataccggctccgccattgaattcgaatcggacaacctgctgcagaaagccggcggtgccgttgccgccacagccgcagaaaagaaactggacgaacagcttgccaaagtaggcatcaaagccgggcaaatgtcattcacattcaacgccgacagcacattcagcgccaaagtagggcaaaagagcatgaagggaagctactcctacaatgcatccacccaaaaggtcaacttgaaattcgccaagctgataggtatgaatgccaaggtcaacgctacctccacaactatggacctgctgttcgaatcggacaagctactgaaactgataaccttcctctccagcaaaagcagcaactccactctgaagagtatcggctcgctggccaacagctacgacggaatgatgctcggattctcattacagaaactgtaacaacaacttccatacaacaaaaaaatcccgcaagcaccgaacaatgcttgcgggatttttttatctgaaaagagcggaaaacgagactcgaactcgcgaccctaaccttggcaaggttatgctctaccaactgagctatttccgcattggatgactctccttttttgaggagtaaagtgcccagaacaggactcgaacctgcatgcctctcgacacacgcacctgaaacgtgcgcgtctaccaattccgccacctgggcataagtcatcttcaatacatctgaaagagcggaaaacgagactcgaactcgcgaccctaaccttggcaaggttatgctctaccaactgagctatttccgcaatgtataaaagcgtgaagagaaggagactcgaactcccacgacataattgtcactaccccctcaaagtagcgcgtctaccaattccgccacctctccaacttactttcaacaattcaaagaaccgactgctttaccttggtgcccagaacaggactcgaacctgcatgcctctcgacacacgcacctgaaacgtgcgcgtctaccaattccgccacctgggcataggtaattgcaatctaaactgcgttgagcggaaaacgagactcgaactcgcgaccctaaccttggcaaggttatgctctaccaactgagctatttccgcgattgcggatgcaaaggtagatattttccttaaacctgcaaacattccgcagacttttttcacacagaaaagtgtacattttcgccaggcatacaagcagacttttgattatcaactcattcgcccacgataatcttcataagaaaattgcttgaaaacttcagcttttccttcttttgtccacattgcaatggccggatggtgaattccattgaacatattcgtctttacagtggtgtaatgtatcatgtcctcaaagacgattctctcccctatctgcagctcatggtcgaaactccacagtcccatatagtcgccgctcaagcaggagtttcctccaaggcgatagacgtaagggcccgcatcgcccatctccgctccacgcactgcaggctgatagggcatctccagacaatccggcatgtggcacgtaaagctaacgttgagaatggcggtacgaatgccgcggttttccacgatgtccactatctccgagctcagcacaccggtctgccaagtaaaagcggaaccgggctcaagaatgatttgaagatgtggatagcgccccttcaagccctgcaacagacggacaagatgctctacatcataatccttacgcgtcatcagatgcccgcctcctaaattcaaccacttaatctgtgagaaccagcgggagaattttccttccaagtgctccaatgtgtgttccagctcgtaggaagaagactcgcagtgacaatgacagtgaaaaccttcaatacccgccggaagttcttcgggaagctggtcggccattacaccgaagcgagtaccgggtgcgcagggattataaagctccgtttccacctcagagtattcaggattgatacggataccgcaggaaatgccgcttccctccgccaccactaccggataaaagcggtggaactgcgaaagcgaattgaaagtaatatggctgctgcaccgcattatctccggaaaatcgacctcggtataggcaggcgagtacgtatgtgccttacttccgaactcctccaatgccagacgggcttcgtagacggaacttgccgtagagtggtctatatactccctgaaaatgggaaaggaacgccacatggcaaatgatttgaaagcgaggattatctccacacctgcgcggtcggccacactttttatcagtgagaggttctttctcagcaatccttcttccataatatagcagggagaagggaaaagggaaaagtctttatttgtcattttatatatattttttttaccatttatgattccatcctaataaacacgccacaaggggttgacaagccctctccaacgatttagtaaaacttcggagaagatttactaaatcgtcctcctcattttagtaattctccggggaatatttagtaaaacagatgccgcccttctgcaaagtcattcttttgtaaacaatattcatcaccatataactttgaaacgcgcgaagcgcagcaaaagttgtttgtctcccgcattcttgaagcggatggtggctttcgcattgtctccttcgccctccactttcaaaacttcacccaggccgaaacgttcgtgctctatcaattgtccctgctgtacacgattggcagacccgccggcagaaggcgatgtacttgccgtatttgcagaaggcgccacccgtttcaggttacgtggaacagtcggcgcaataatctgctgtttcggtcgtacagacacacgctcttttcctccatacggagcatcttccctatcaggcgcaaaacctctggcgttctccctgcggaaagcggcggcttcctcctctaccctgcggaacattcccgcatcctgaggcagacgcaggaaacgtatatctatatccttcaggaaacggctgggactgccaaactccatcttgccatatcggaaacgcgtctttgcatacgataggaaacagtgttcttcagcacgtgtgatggctacatagaacagccgccgttcttcctccaatgcccggggagagtcacccaccatgccgctgggaaaaagattctcctccatccccactacaaacacattcttgaactccaatcccttggccgaatgtacagtcatcagggttatctcctcatcgtccccatccttatccgaatcctggtcggtaagaagggaaacttccgaaaggaagtcacccaacaacacgttcgggtttccttcctcctgccgttgggcacaaaaatcactcataccgttcaccagctcctctatattctccttacggctcagattctcgggagagttgtcctgacacacatcattgatgatgcccgattggcgaataatgtcggcaccgatctcgtaggcattcttctccgcagcatctgtgataaaggcggatataagttcgcggaatgcctgcaactttcccaccgtacctttattgaagttcaagccatacgccaacggctcacaaagcacggtccacaaacttacattgtgcccggtggcggcagcaatgatttttcccactgtcgtatctccgataccacgcgcaggataattgataatacgcttgaaagcctcttcatcattgggattcactatcagacggaagtaagcgattacatctttgatttccttgcgttgatagaacgacaagcctccgtaaatacggtaaggcatactgcgtttgcgcatggcttcctcaaagatacggctctgcgcattggtacggtagagtatcgcaaaatcagagtaggcatagcgcttttcacgccgcagttcagctatcttattcaccacaatatccccttcttccacatcactgtatgcctggtacacaccaatggcctctcccttctccttttccgagaacacttccttgcgtatctgccactggttcttttctatcaggctgttggccgcgcggacaatggtctgggtggaacggtaattctgctccagcttgaagaccttcgtatcgggatatactttcgtaaagtagagaatattgtcaatatcggcaccacggaaggagtagatactctgtgcatcatcccccaccacacagacatgctgatggttcttggcaagttgcagcacgatgctgtgctgtgcaaaattggtatcctgatactcatctaccagaatgtaacggaactggtcctgataacgcgccaacacctcggggtggtcccggaacagcaggaatgtgtagaacagcaaatcgtcgaagtccatcgcatctgcctgccggcaacgctcccaatatctctggtagatgtcgcgaagcgccggaaccttggctgcacggtctccttcgtaagcctccttgttgttggcatagcctgccggagaaaccagatgattcttggcattcgagatacgcgcctgcaccatccccggcttgtacactttctcatccagccccatttccttgataatggaacgtatcaagcttttactgtctgccgtatcgtaaatggtaaactgcgaagtgaagccgatatacccggcctcgacatgcagaatgcgcaggaacatggagtgaaaggttcccatccacagatggcgcgccctctccggccccacctgacgggctatacgctccttcatttcgcgcgccgccttgttggtaaaggtcaatgccagaatgttccaaggctggtagccattctccagcagataagcaatcttgtaggtcagcacgcgcgtctttcccgaaccggcaccggctatcaccagtgacggaccgtcattgtataacaccgcgttccgttgtccttcgttcagttcctctatataatcgggcatatccgtataatcttaaaatgatgatattttttcttcctttgtttttacggaggcaaagataaaaaaagcttcggagacgtacgaacatttctataggttatagtgtttatatagtaaaattccaaaattaaataattgaaacttatgaatacaatattaacgattttaatgataacagttatgacttacgaaatgccaaaacttccctacaccaacaatgcactggaacctgtaatcagtcagcaaaccatagattaccactacggtaaacatctgcaaacctacgtgaacaacctcaacaacctcgttccgggaacggaatttgaaggcaaagacctggtaaccattgttgccacagcaccggacggtgccatcttcaacaatgcaggacaagtgttgaaccacacattatacttcttacagtttgctccgaagcctgcccacagcgagcctaccggcaagctggcagaagccatcaaacgcgacttcggcagctttgagaatttcaagaaggaattcaacgcggcagctgtcggcttgttcggctccggatgggcttggttgtctgccgacaagaacggcaaactccacatcaccaaagaagccaacggtagcaatccggtacgcgccggtcttgttccgctactcggattcgacgtgtgggaacatgcctactatcttgattaccagaaccgccgtgccgaccatgtgaacgaactgtggagcatcatcgactgggatgtagtaggtaaaagactgaaataagcaacaaggttccactaaacatgttaatgacgcattcttgagcaactaaggttcaagaatgcgttttcttgtttaaaatagccatctaacatattttaaagaaattctttggcttctaccataagtattcattaactttgctaaacttaaaagttaaacaaaagaaatgaaactcatcgtagtaacagcacccacattttttgtggaagaagacaagattatcacggcactattcgaagaggggctggatattctacatctgaggaagccggaaactcccgccatgtattcagaacggcttttaacgctgatacccgaaaaataccataagcgcatcattacccatgagcacttctacctgcaggaagagttcagcctgatggggattcatctaaacacccgcaatcccaaagagccccacgactattcgggccacatcagttgcacctgccattcactggacgaagtgcagaacaagaagcatttctatgactatctgttcctaagcccgatatataattgcatcacaaagtccggagtcacgtccggcttcacagccgaagagttgcggcaagcaggaaaaagtaaggtcatagacagtagagtcatggctttgggaggcattactcccgacaacatactggagattaaggattacggattcggtggtgccgttgtaatgggtgacttatggaataaattcaatgcctgcaccgaccgcgattatctggaagtaatccgccacttcaagaagttgaagaaaatggctgattgagccttcttggactggcaaatcaaaatttaccgtactctttgtattcaataccggcaggcaacgtgaaatagaaggtggagccttcccctttcttagactccacaccgatacctcccccatagtgctccacaatagatttggtgatggaaagccccaaccccgtacctttgatattgtagttcatcttcacaaaccgttcaaagatggcatgtcttcccacttcatcgataccacagcctgtatctgccacataaaaatagaagttatggttgctcaatctcctgcaaccgattttcacactgcccatctccgtaaacttcaaggcgttcctcaccaagttacctatgacttgggcaaaacgcacgcggtccaccaccaaacggcattgaggcaaccgttctacaaactccacctgaatgcccgtgggatgcgagcgcatattctccgtcgtacagacttcatcaatcagcgcgtttacatccacttctccatcgttatattccagagtatttgcctcaatcttcgagtagtccagcaagtcattgaccagttgcagcagcgagtccttgttatcattaatctccttcagaaaagccatacgggtttctctgtccagatcatccatttcggcaagcatagttgtaaagcctacaatggcattcaaaggagtacgaatttcgtgagtcatattagcgatgaaagcattcttcagctggttggattcttcggcaacctcattgatgcgctgcaacgtcttcaaccttttgctcttgctgatggaaatgattatcatgatgaccaaaagcagaatgacaattatcccaaaactatataccaatgcttcattattctgatagaagtcattcgtccaaacatcgtatgctgccgtaattgtcaatatcatcgttttttgcttgcttattggaaactataaaattatgggaagcaaatatactaaagaaaatacaaataaattaatagaaactacagttttttccaacaaaataggccgcatgccattaccaagtaaagcatgcagcccataaatgtcattattcagtattattgaaatcagccttcaatggcagcctgcgccgcagccagacgtgcaataggcacacggaacggagaacagctgacataattcaagccaactttgtggcagaacttcacagaagaaggttcacctccatgctcgccgcaaataccgcacttcaagtccggacggatagcacgtcccttttcagtagccatgcgcaccaactgtcctacaccattctggtcgagtacctggaacgggtctactttcagaatcttcttctccagataaatcgggaggaaggaagcgatatcgtcgcgtgaataaccaaatgtcatctgagtcaagtcgttcgtaccgaatgagaagaactcggcagaggaagcaatgcggtcggcagtcaaggcggcacgcggaatctcaatcattgtacctaccttgaagtcgatgctgtcacccacttcttcaaacaactgggcagcctcagcacgaatcacttcttcctgctgcttgaactcatacaagataccggtcagaggcaccatgatttcaggatgggtttcaacaccttccttcttcaattccaaagcagcacccaggatggcacgcgtctgcatctgtgtaatttcaggatatgtatttcccaaacggcaaccacgatgacccaacatcggattatgctcacaaagtgcctcaacacgttgctggatatactggaggctcacgcccatcgtatctgccatttcctgctgtcccttcaggtcatggggaacaaactcatgcaaaggaggatcaagcagacgcaccgtcaccggacagccttccattgccttgaaaattcccttgaagtcagcttgctggtagggaagaatcttagccaaagccttgcggcgcccttctgcattttctgccagaatcatctcgcgcatggctttaatcttctcgccttcaaagaacatgtgttccgtacggcaaagaccgatacccacagcgccaaaattacgtgctactgcggcatcatgaggagtatccgcattggtacgaacctgcagcttcgtatatttgtctgccaaatccatcagttccgcaaagtcaccggacagctcagccgcttttgtctccaccttgtctttatatacttcaccggtgcttccgttcaaggagatatagtcaccttctttcaacagtacaccatccacttccactgtacgcgccttgtagtcgatgttcaaggcacctgcaccagacacacagcacttacccataccacgagcaaccactgccgcatgcgaagtcataccaccgcgggcagtcaggataccttcggcaactgccatacctgccaaatcttccggagaagtctcgatacgtaccatcaccacacgcttgccggcagcatgccattcggcagcatcatcggcaaagaatacgatttgtcccgtagcggcacccggagaagcgggaagaccacgggtcaataccttggcttgcttcagcgctgtcttgtcaaataccgggtggagcaattcgtccaacttattgggctcgcaacgcatcaatgcggttttttcgtcaatcataccttgatgcagcaaatctacggcaatcttcaccatagcggcaccggtacgcttaccattacgggtctggagaaaccagagtttaccctcttgtacggtaaactccatatcctgcatatcacggtagtggttttcgagcttcgtctgcaaagcatccaattctttatagatttccggcatagcctcctccatggaaggatacttgctggcacgttcttcttcgcttacaccggccaattcagcccaacgttgagaaccgatttttgtaatctgttgcggagtacggataccggcaaccacgtcttcgccttgtgcattaatcaaatactcaccgttgaaaaggtcttcaccggtagcagcatcgcggctgaagcaaacacccgtagcagagctctcgcccatattaccgaataccatagcctgaacgcttacggcagtaccccattcgtcaggaattccctccatcttacgatacaaaatagcacgttcgttcatccaggagttgaatacggcacaaacggcaccccacaactgctcgtaggcacaagtcgggaagtcttttccggtttgttctttcaccgcagccttgaacttcttcacgagttccttaaggtcttccacctcaagctcgttatccagcttcacgcctttagcatgtttcacctcttctataatagcctcgaacgggtctacatcttccttgttcaccggtttcatgcccagcaccacgtcgccatacatctgcacgaaacgacggtaagagtcccatgcaaagcgtgcattgcccgtcttgcgcgtcaggccttccaccacttcgtcattcaagccaagattcaggatagtgtccatcatgcccggcatggaagcgcgcgcacccgaacgtacggaaaccagcaacggattctccacatcaccgaatttggaacgcatcagtgtttccacatgggcaatggcttgttcaacttcattcttcaacagagcaacgactttatcctgccccatttcataatattccgtacaaacttctgtcgttattgtaaagcccggaggaaccggaacccctataaggttcatttctgcaaggttagcacctttcccacccaaaaggtttctcatatcggcctttccttctgcctggccgttaccaaaggtataaactctttttttgtccataatataaatttaaagtttttgatagtgatttctcttttctgctcgcaaatctaagtatatttcgcagactagaaaactttttcagaaaaaactttatgctaaaatgcaatttcgacattgcaatctttaatatttcatttcatagagagaaatcccgaaaaaatgtctatttttgccgaagaatttattagattggtgtaaaagtggcaagaaagagaaaagaacttcccctactggagaaggtgacaattacggatgtggctgccgaaggaaaagccatcgcaaaagtcaatgatttggtgattttcgtaccatatgtcgtccccggcgatgtagttgacctgcaaattaagagaaaaaagcatcattatgctgaagccgaggctgtgaaattccatgaatattcggcagtacgggcagttccattctgccaacattatggtgtatgcggcggttgtaaatggcaggttctcccctattccgagcaaatcaagtataagcaaaaacaagtaacggacaacctcacccgcatcggcaaaatcgaattgccggaaatctctccgatattaggttcagaaaaaactcagttctaccggaataaactggagtacactttttccaacaaacgttggctgacgacagaagaggttcagcagaatgtagtgtacgaacagatgaatgccgtaggcttccatattcccaatgctttcgataaagtgcttgccatagaaaagtgctggttgcaggacgatatatccaaccgcatccgcaatgcggtacgcgactatgcctaccagcacaactattccttcatcaacctgcgtacgcatgaaggaatgctacgcaatatgattgtgcgtacctctaccaccggcgaactgatggtaatcctcatctgcaagatagagaaagaggaggaaatggctctgttcaagcaaatgctgcaatacatagcagatacattccccgaaatcacttccctgctatacattattaataataagtgcaacgataccatcaccgacctcgaggtacacaccttcaagggaaaagaccacatcttcgaggaaatggagggactgcgcttcaaggtaggtcccaaatctttctatcagaccaactccgaacaagcctacaacctctacaaagtagcacgcaactttgccggactgaccggtaacgagcttgtttatgacctttataccggcacgggtaccattgccaatttcgtatccaagcacgcacgccaggtaatcggcatagaatatgtgcccgaagccattgaagacgccaaggtcaatgccgagattaacggaattaaaaacacattgttctttgccggagatatgaaagacatgctgacacaagacttcatcaaccaatacggccgtcccgatgtcatcatcaccgaccctccccgtgccggaatgcaccaggatgtagtggatgtcattctgtttgccgaacccaaacgcatcgtatacgtcagctgtaatccggctacgcaggcgcgcgacctgcaactgctcgatgcgaaatataaagtgaaggccgttcaaccggtagacatgttcccgcacacccaccatgtggaaaacgtagtattattggaattaaaagattgaaagtccaagtagttttcaatcgtaaattgtaaattgtctaatcgtaaattaaaaccagtcgtggcaaaagaaaaaattacagcaagagcccgcacacaatatacggactacatggtgaaggaaccgatggagctcatggagtttctggcagctaaaatgccggacgccagccgcaccaagctgaaatcattgctgagcaaacgcattatatatgtggacagcgttatcactacacaatacaattttcccctgaaaccgggtatgaaagtacaaatcagccgtgagaagggacgtaaagagttcaaccataaactgatgaagattgtatacgaggatgcctatatcatcgtgatagagaagatgcagggtttgctgtccgtcaacactgaccggcaaaaggaacgtaccgcctataccatcttgaatgaatacgtgcaacgctcgggcaagcagcaccgtgtacacatcgtgcaccgcctggaccgtgacacctccggcttgatgatgtttgccaaagacgagaaaacccaacgtacactacgcgataactggcatgacattgtaacagaccggcgatacgtagccgtagtggtcggcgagatggaaaaagatgcaggaaccgtggtttcttggttgacagaccgtaagctgtatgtatactccagcccgacagatgatggagggcaagaatccattacgcattaccgtaccatcaaacgagccaatggatactctctcgttgaactgaacctggaaacgggacgaaaaaaccagatacgtgtacacatgcaggatttggggcatcccattattggcgacggacgctatggactggaagacgtaaatcctatcggacgcttggccctgcatgctttcaaactctgtttctatcatcccgtcacgggagagctgatgcggtttgaaacaccttatccgggagagttcaagaaattggttttgaagaataagtaaaaagctgacatacaataaaaaacggagcaattgatttgctccgttttttattgataagcatgtcgtcattgccgacgcatacgaaaaggctgtccgtgaatattatcttgatattccctccagctattataccaagtaccactgaaagaataagaatcagccatggctccttcaatgtaagccatgctgccatcatcatagaattccaattccatcagattgtaagccccactaacccaattccatctgaaaagcaaataattcgggtcgccatatgaaccaatagtaccttggttgcgcgcgttaaaggtcataatcgtccccctaccccaagtatatgccccgaaatctatttcttcagatgtataccattcaccgggcagattatattccgtttcttcctcactatcacatgatgtcaatcctaatacaaggacaaacaacaataacatttttgtgtatttcaacatattattcataagccatactttatttataattagcatctaccatcataacaaccactccatccagtttaccggataaataatgttcgcgcacccatacattatcaaagtacttgatttcaccggcaccataattcagagtcaacccctccatagacttatccatccatttccaagtaaaagtacgtgaagtcgtttcatagggacgggactcgcctccgcgataatactcccagatttcctgtccagaattatcagccttggcaaacttcagctgatgactgcataacacttcaactccatctttgttttccgtctgatattcttctatccacgtcttcccacacaatttgtcgtcgctattctgcatggtataatatacatcatccccacaagacgccagcccaatcgtaaatacacacaacagcaatatcttcacataattcaaagtcttcataagttatcgagtttagttaatacttgcggacaaacatacacaaaaaaaatgaaacacttaatacttatcctggaatttcttgtagaagacaaggaataaaataaatcccatcagtgcaaacggtacgcctgccaatgcgggataacggtatcctccactcaaggcaagacctccgatataggctccgatagcattccccaaattgaaggccatctgcacacaagcgcctcccaacatttctcctccaggggccacacgaatcatcaacacctgctccggactggagacggcaaacaaacctgccgtacagagtgtcatcaatattgccgaacaccacggatagggcgagagtaaaaatatcaataataaaataacacatatcatcccttgcaccaccgtacctacctttcccggagtgtaccggtcggacatgcgcccactgaccagattgccggcaaccattccgaatcctgccagtaccatcagcgccgtaatgctttccgcactaaaaccggaaacctcagtcagcaacggggtgatgtagctataccagcagaatacgccaccgttgcccaaagccgtagctcccaatatgagccacggcgccggcttcttcaaaaaacggaactgtcctttaaatcccgtgtctttcagtccttcgacctgcggtacccaacgccaaatgtagtacaatgttatcaatccccaggcacctaccagcagaaacgtggcacgccaagacagtgtatggctcaacgaagtacccaacggcaccccaaacagattggccacagtcattcccgctatcataattgaaaccgcctccgagcttttccccttatcagccaattttcccgcaacaatggaagccaccccaaaataagcgccatgaggaagtccggaaacaaaacgtcccaacagcaagacccaataattgggtgccatagacgcacaaatattacccacaatcattaatgccatcaagaccagcagaatctgcttcaacgggcgtttacgggccaggagcagcatgggcgcaccaaaacaaacacccaacgcatacgcagaaatgaaatgaccggccacgggaatgctgattcccaaatcagtagccacatagggcaaaatacccatcatcgtaaattcggcaatccctagccccaatgtgccgaacgccaatgcaataagactcttcttcataccttaaaaaacaacctatattttttaccgggcgcaaagataatgacattgcattctccaaataaaaaggataccgaattattttcagtatccttcttcattttttatcttatatcaattgtatacccacctttaaagactcctcccggcgccaagtgctgcatccagtccttatccttatattcgcccttataatgggcacggtcacaacgcccgtaccacggctcgatgcagacaaacggagcattcttggccggaggcgaccacaaccccaccaccggagtgtcgaaatacagactgagatagggcttcttctccttattatataatgtaacttctttcacttgactgttttccagaatcagggcatctttatcaaaggagtggatgtccaaaggcagcaggccatctgtcaactcaagcaaatattccttatccggagcggcacatcctttctcggagataaggatatagtgcaaaccttccgtcttatcaaagccgaaatatccacggtccgttgtctccgtatcatagtccgggtaatagaaagccggatgggcccctatctggaagtgcatttcgcgtgttccggtattgatgactttccaaagcacctcaatcttctttccctctatccgatagcctatctcaaggcaaaacgggaaaggatatttcttgcgtgtttcctcactgtcaaccagtcgataacgcacttcatcttccagttcaagcatcaattcaaaatccatatcgcgggcaaaaccgtgttgcgtcaatgcgtaggaaacgccttcgtgacggtattcattctcccaaacgctgcctacaatgggaaaaagcaccggagaatgccgtttccagaaagcggggtctgcctgccaaagatattcttttccatcatgcaagatactgcataactcggccccatgtggggagactttaattgtcagttctgaattagaaagtgttttcatatcatatatcattttgttattttctcatatagtgtggcatctctccgggtatttccatcgaaatctccaccaggccaccgactactccgtcctgtttccatgccgtctgataaatcattttcttgacaccgttcttctcaatggtgtaggcattcacttcccccgtctccagcagttcgcgtatcttggcctgcgattgcgggttgtggcaatcaaagagattcttgcctatcaggtcaccgtgtttggcaaacgtacggcatgctttctcgttcatatataggatgattccctttgtgtcgcatacagttacggcacagttcatttcattggcccattcgtacataattctttatttttaattggctattttctatgcacttgaaatacatttacagaaaactcttcaaagtcaaatgtccttttctctatcgaattattattgcattaatcctccttctatgaagaaaacgacttcattcaatcgttctttattcgattcttcatctttgaaaatagctggagtgaagattatcctatcttgaatcagattatctaccaaatcccacatgacttcatggtacagcatcaccattgccactttttcattgtcaataccatattggcttgctaaggagccacaattattctttagttccgcactgatagagtttaccaatttttcagttatttgatgaaagcggtcttgccgtttctttataataggaaataatacatctccattatcatctaccagcccataaggttttaactgagaaacgagtttggcatctgttacttttccgaactgtgctatttcatcagcacaatggtccataatgtcgttgtcaggagcaatgccgctattgatgtaagtcaaaatcaaattctgttctccgaaaccattcgtaccgcatgcaaagccatttcttgattcgtataatacccagtaacagccactccagcttgtataattgtcaacatcctcaaacaagactaactttgtccacatttttccatccagaaggtatgaaaaaacaagtgagagtacattgttcttgaatcccatttcactgatagtttgtgccaatgatataaagtctgcctttgttttgacatacatggattcagcaatctccttacttaagcttcttagagaattggtctgttctttgtcgagaatgggtatagtagctttccattttccttttgttttactgacaagtccacctacttccaataacaataattggctatcagagcatttaatacccatttcacgaagttcggcttgagtacgtggagtccgtaaattgtatagtatttcccaattattatctggcgttacatagtcttcgggctgatgtccgttcactgcaacaaactgggttgcttcccattcgctataaggtcttatcgatatttgtgctttaatcattgtggtaacagacaataaggtaaacaacaataataagtccggataatatttcatatatcgcttaattttagttttgttcatcattcatgcacttctcttatgtaacaaagataacgtttttttcaattcctctctcaaacctataacaaaaaacttcccgactaccaataaaaaacttcctaactactaatagtaaagtttgcaagtatagagataaagaattaccttcgcccttggtttgtctatcccaagccttgggatagaaatccccaaccttggcatacacatccgcaaccttgggacaaactctgtaagccccaataaacaaacgaacctcataacaacgctaccatcatggcagaatacaacatgcaggaactgaacctgccgggagaagacggcaaacgcatcctctacccacgaatgaaactatacgggcaggtgaacttggaaaccatcaccgaaaagatagcatacgcctcatccttcacacgaggagacatcatcggactgatgcaagccatcaccgacgaaatagcctaccaaatggggcaaggttactccgtgaagattgacaacttaggagtattcacccctgccctcggtctgcggcaagaccgtgaacgggagacgggcgaagaaggagacaccaagcgaaacgccgtcagcatctgcctgaaggacatacatttcaaggtggacaaagaactactgtaccgtaccgctcgccattgccacctgaaacgttccaccgacaaattccaacgctcctcacaagtgttttctccgcaggaacggctggaacgggcaaaaaaatacctggaaaagaacagcttcatgacccaagccgactattgccaactgaccggcttattgaagtccgccgcctcccgcgagttgcgcgaatggatagccaatcccgaatcgggcatcgactacaaaggacgaggaacacacaagatttatattctaaggaaaccataacccacatccattgaagtaacaaaaacaatgaagatactacataccagcgactggcacctgggacacaccctctacaactacgaccgcaccgtcgaacagcaggccttcctacggcaactcacccgcatagtaaccgaagagcagcccgacgccatggtggtaagcggagatatctaccactactcctctcccgctgccgccacgcagaagatgtacaccgacgccatgctgaacattcaccaagcctgccccgaaatgaccatcgtagtcaccgccggaaaccacgacagcagctccaaattggagatagacagcaacctctggcagcacttcggcttgaacgttgtgggaaacatcgaacgtacagccgaggaagtgaatttggacaagcacatcatcgagataaacaatgaaaaaaagacaaaaggctacgtcattgccgtgccccacgtctatccgcaaaacttccccctgctggacactgaaacaccgcgcgaccaacggcagacccgcttcttccaggcactgctggacgaagtgaagaaacgaaatacggcacagcttcccgtcgtcctcatggcccatctctctattgaaggcagcgaccgtagcgggcacgatgagagtattggcggaatagagtatgttcccctcagcgctatgggagaagggtacgactacctggcactcggacacatccattgccctcaggacatcaaaggcagtcatcaccacgcacgctattgcggcactcccctccccgtcagcttcgacgaaacctatccgcactccgtctccatcatcgagttggagaaaggggcagagccacaaatcagtacaagggaaattgaaaatccgattccgctcgtcacacttccccatgacccgacacctttcgaagacgccttgaaactgctggaagaatatccggaagagaaacctgcatacctccgtctgaatgtgctgacaaaaggctacctgccccccgactgcaacgaaaaagcctcgaacgccgccaaaggcaaggcatgcaaatattgctacatcaagactacccgagagcggcaggccgacactgacgagagcaagcctatctccatccaagagatgcaggaaatgtctcccctggaaatagccagactctactaccgcgaaaccgaaggagaagagatggacccagaactttgccagctgatggagactgtcatgcaaaaagtgaaaagcaagaacaactcctaatcatttgtccggaacatgaaactccagaaactcaccataaagaaccttgcctccatagaagatgccgtcatcgactttgagaacggaccgctaagcgaggaatcccttttccttatctgcggtgagacgggtgcagggaagacaaccattctcgacgccatctgcctggcactctacaacgaaacgccccgcatggaccatgccgagaacgaaaaatacaaagacctgagccagactttctctgccaaaaaggaagatgttgccatcaacgacagcaggcaactgatgcgccgtaacaccagtgaagcatggacggagctggagtttaccggctcgaacgaaacgccctacaccgcccgatggtacgtggcacgggcacaccgcaagatttcaggagccgtgcaagatgtgcgctggacactggaaaacaagaaaagcggcgcacagctcaacaaaaagaatgagataaaggcagaaatacaagctgcagtggggttaaccttcgaacaattctgccgcaccaccatgctggcgcaaggcgacttcaccaagttcctgcaaagcaaggaaagcgaaaaatcggatattctggaaaagctgaccggtacaagtatctactccgaaataggtgccgaaatatatgccgccaccaaggaaagacggacggaatacgaaaaccagaaccggaagctggaaggcatccacatcctggcagaagaagaagtctccacaatcaaggaagccatagccacgcaaaatgccggagtcaaggaagccaatgagcagaaaaccaccgccctcgcaaaaagggactggctgaaaaaatactccgaactcctcctcacccgtgaacagcaaaagaagatgtgggaagggaagcaagcgcaactgcaatcggacgaattcaaacagaaagaactgctgattaaggaatggaacgccaccgccgatgcccgcaactggctctctaccttgaaacagcagcaacagcaacaacaacagaactatgcacaagccgggatactgagagcatcctttgcccggctggacggaggaagcaagtggctatgcggtttcctgaaagagcaagaagacaagctgcatcgtgccgagaagtacttgcaagagcattcgcccttactgcccatgttcgagcaaagccaatccatcattaccggcctaaaatccgcactcgatgcccaaacacgcatcggcacctacaacgcgcaccttgaaagacttgccgcgcaacaacccgtaaaagtcaaggagcgtaccgacaaggaagctgccctcacccggaaagaacaagagaaccatacattgcaaaacgaaataaacctccggaacaagcagcttgaaaccatggaccgccctgccctgcaagacaagaaaaacaaactcgatgccggacgggagaacctgctgcaagcattgagcgccttgtctttactggctgaaacggaaaggacactgaacgaggcgaaggaaaacgaaaaggctttgaacgccaaagtggaggcgtgccaaaagcaatacgtcctcctgcaaacggcattcgacagcaagaaaacaagttatgatgacatccgcaccctctacgacaagcaaaaggaagccgtagaagagtgggcaaaggaaacacgctcccggcttgtcgtcggggatacttgccccgtgtgcggacaagaaataaaatcgctttgcaaagatgaagatttccagtctgtccttgctcccatacgcacctccctggaaacaaaagagaaagaatacaaggaaaccgagcaggcattgaacaacaaccggacagaatccaatacctacggaacgctggcagagaatgcccgtcagtccacagcaagagcgctccggagctacaaccttgcccacactgacgcacaggccaaatgcgcccaatgcaacgacgtcggcctctccacaaccaccggcgaaaccctgaagaagctactggaagagaacaagctggaagcagacaaactgaacgaaaagctcacggaagttcaaaagctcagcgcacaaatcataactctgcaacggcaaaaggacgaatgccaaaaacatgtggacgctgcacgccaagccttcaactctgccgacagagtgctgaatgagctgaaaaacaacatcgtcaattacgagtcgctcaccgccaacgaaaaagagaacatacgtgccaccatggaccgcgtcactccccacatcctctgggaaggatggaacacggaatgggagaactcccccctctcctttattgaccgcctgacgcaagctacgcgcaactaccggctggcgcaggaaaaacaaagagaactgaaatccgccattgcccttatccacaaagagctggaagggataaacatcaacaaggaaagcatcgatgccgcattccccgactggcgcaacgcacctgcagctacacaggaaatggaaatcaagaacctggggattgcctggaataatctgaatacacaagcaagcggactgaaacaaagcatatcctccaccgcagaccaaatggcaaggctgcaaaaggatttaaccgggttctatgccgccaaccccactctcgacgagaatcgtatcaccgtcctatccgcttggtccggcttccggatagaagcattgcgtgcctcattgcagacacttaaagaggaagaagtagctgcatcgaccgcctttcatctggccaccggacaagtggaagagcacatcggccggaaaccccaaatagaagaaaacgaaagcctcgaaaccctggatgcactcatcgcgaatctcgaagaaaagataaccgccggcaaccaatccatcggccagcagaagttacgcctggaagaaaacacccgcaacatcgaccggataaaggaagaaaaagaacataccgaccagctgcgcgaagagtatctgaagtgggaccgcctctgccgtcacttcggcgacgaacggggaaagaacttccgcaacatagcccagagcttcgtcttgaaagaactgctggcaggcgccaatttctatctgcaacgcttgaccgaccgctacgaactggaatgccaggccggttcgctcaccatcctgctgcgcgacttccatcaaggaggctcggcacgtccggcatgcaccttatcgggcggcgaaagcttcctggtatctctgtcacttgccctcggactttcttccctcagccgccagagcctctcggtagacacactgttcatcgacgaaggcttcggcacactgagcagcgactatctgaacaccgttatggacacattggaaaaactgcaccggatgggtggcaagaaggtaggcatcatcagtcacgtggaaggactgaaagagcgcataaagacccagatacaagtacggaggatagacagttcaagaagcgaaatagaagtggtgaataccctctaagctggcatcgggataaagaaaacgaatgttttttcggctcttgatagtacaagcacctgcattattgtgtatttttgcagtctcataaaaaagaaaagacaatgaaaaagttcatgaaaggagcccggtttactcctaaaaactattccgacgaagtagaagccaaaattcaacattataagaaagaaggatataaactgccgatgcgaagcgcactccgtaccgaggagcagttagccggtatccgtgcaagcgccaaaatcaacacggccctgctggattatctctccgagaacattcgcgaaggcatgtccacagctgaaattgaccatatggtgtattgcttcaccacagaccacgacgccatccccgcccccttcatgtacgaaggcttccccaaaagtgtgtgcaccagcatcaacgatgtagtgtgccacggcattcccagcaccagggaattcctgaaaagcggtgatattgtaaatgtcgatgtatccaccatttacaaaggttactttgccgacgcatcacgcatgttcatgattggcgaagtcagccccgacatgcagagactggtacaggtcaccaaagaatgccgtgacataggcatacagaccgcacagccctgggcacgcctcggtgacgtaggcgccgccatccaggagcatgcggaaaagaacggatacagcgtggtacgcgacctctgcggacatggctgcggcgtcaagttccacgaagaaccggatgtggaacacttcggcaaacgtggtacgggcatgctgatagtgccgggcatgacgttcaccatcgaaccgatgattaacatgggaagctacgaagtctttatcgacgaagccgacggatggaccgtctgcacagacgacggactgccttctgcccaatgggaaagccaaatcctgattactgaagacggaaacgaaatattgacacaataaggcggacacttcaaaacacctatggagatagtattactgattatagggataatcatcggaaccgtagtcggctatcttgcggcagaccgcaagtctgccgcactgagggcagaaatcagcgggacaaagaaggaaatagaattattgaagctgcagaaggaagaagccgaagcgttgcacaagcgcatgaacaccgagttcgagaatctctccaaccgtatcttccagagcaaagccgaagactttaccaggctgaataccgaacacctgggcaatctgctccgcccgctgggcgataacctgaaggacttccgccaaaaggtggaacaagtatacagcaccgaagccaaagaacgcttctcgctgggtgaacgcatcaaggaactggtggaactgaacaaccgcctcagcgaagatgccaacaacctgacccgtgccctgaaaggagactccaaaatgcaaggcaactggggcgaaatgattctggaacgtttgttgcaagcctccggactgattgaaggcgaacactacttccgccaggagtttctaaaagacgaacggggcgaagccatcatcaacgaggaaagcgggcagaagatgcagcccgacatcatcgtgaaataccccgacgaacgggaaatgattatcgactccaaagtgtcgctgactgcctatgctgcctacacctctgccgaaagcaaggaggagcaggcacacttcctgaaagcacacctgcaatctgtccgctcccacatcgacgagctcagccataaagactactcgcattacgacgcccaatcaccggatttcgttatgatgttcatccccaccgaaggtgcctacctcctcgccatccaaagcgatgcccacctctgggaatatgcctacaacaaaaaggtggtactaatgagccccaccaacctgattagcgccctgcgcctctcgctcgacctttggaagaaggagaaccaggtaaagaatgtgcaggccatcatcaagcgcggcaccatcttatatgaaaaaatcgcaggctttaccgacaccttcctcggtatcggcgaccggctggccagcctgcaaagggattacgacaaagccttcaaccagctctcggacggtaacggcagtgtagtacgccaggccgaaatgctgaaaggcatgagcctcactcccaagaaacgcatttctccaagattgctgcccaaagataccattcaagaagaaacagaagaggaaaacgataacattcaataaaacatccaacatgaaaactctgaaagaccgcattctccttcaccaagaaccattcatacgaggtctgtgtcaacaggaattaccactggagaagtaacagccattctggcaaatgcactgattcatatcaaggaataaagaaaaagcgacgaagaatccactccactttctttcattagagaggaaatgccccgaacaaaaaactccggcaaagccctgaaggacaagccggagtttttttatctcaagacggacaaggaagattatccgccaaagttatcgaacatcaggttctgagccggaacgccgaggtcgtcgagcatcttctcaacagctttcgacatcggaccgggaccgcacatgtagtattcgatgtcttcgggagcttcgtggtctttcaagtaagtctcgtaaattacgttgtgtacgaagcccggagtgtacttcacgcccgctgcatcggctgccggatcgggacggtccagtgcaagatggaacttgaagttggggaaatccttttcaatctgcaggaagtcttccagatagaacacttcattcaatgcacgtgcaccgtagaagtaattcatcacgcggtctgtagtgtgcagcgtcttcgtcatgtgcataatctgtgcacgcaacggagccataccggcaccaccgccgacccacatcatctccttcttggagtcgaatatcggatggaagtctccgtaagggccactcatggttaccttatcacccggtttcagggtaaagatataagaagaagcgatacccggcattacatccatgaagcccgggccctggtctttcggcttgaacggaggcgtggcgatacgtaccgtcagcataatgcggtcgccttcggcaggatagttggccatagaataggcacggatggtttcttcgtcattgcggcacttcaagcccagcagaccgaatttctcccatgcaggcagatactcatcaccgataaggctcttgtcgatgtccttatcataatccatcgaatatttaggaatcttaatctgcgcataagaacccggaacgaaatccatgtgctcgcctttgggcaaagcaacgatgaactctttgatgaacgtagccacattcttgttggagataacctcgcactcccactcttttacgcccagtacgctttcgggaaccttgatagccatatcgccttttaccttcacctggcaacccagacgccagtgatcttgtatttgcttacggctgaagtgcggagtctcagaaggcaagatctcacccccaccttccattacctggcatttgcactgtccgcaggaacctttaccaccgcaagcggaggaaaggaacacaccgtttacagacagcgtattcagcaatgtagaaccggaagctacgtccagttccttatcaccattgatagtcagttttacattacccgaaggcaccaagaaattcttggcaaccagcaggataacaacaagcaggatgacaaccacgaggaatactccaatgcttgctaatatcatattcatatccattgttttattcctttcttttagatgttcaaaccagagaaacacataaatgccattgccatcagacctacagtgataaacgtgatgcccagccctttcaacggagcaggaacgtcagaataggccattttctcacggatggcagccaaacccacgatagccagcaaccaaccgataccggagcccaacgcataagagacagcatcagcaatgccaccgatgaatttcgggtcactctcgcccaacgtgatgcgctgctgcatgaaaagagaagcacccataatggcacagtttacagcaatcagcggcaggaagatacccagtgaggcatacagcgaagggctgaaacgctctacaatcatttccaccaactgaacgatagctgcgattacagcaatgaaaagaataaagctcaggaagctgaggtcaacgccttcaatgattgcgttggcagccagcaccttggtctgcaataaatagttgaccggaagcgtaactaccaacacgaaagttacggcgatacccagtcccacggcagtcttcacattcttcgatacggcaaggtaagaacacataccgaggaagaacgcgaatatcatgttgtccacaaagatagagcggacgaataaacttattaaatgttccatatctcttcgataaattaagaattaaagaattaaagaattaaagcaatgagaacttgtactgcagcagagcagcccatttttcattctttcatttttcattcttcatttatttattactgcttttcctgcaattctttgtgacgtgcacgctgataccagatgatgcaagcgcagagaatcaacgccattggcggcatcagcatcaagccgttgttcacatagcccaacttctgcagaggttcatagttcaagatgttgaaaccgagcagcgttcccgaacccagaagctcgcggaagaaggctacgattaccagaatcttggcatatcccaaaccattacccacaccgtcaaggaaagattcccagggaccgttctgcatggcaaatgcttccaagcgtcccatcaggatacagttggtaataatcagacctacatatacagaaagctgcacacttacatcgtaagcaaaagctttcagaatctcacttacaatagttaccaacgcggcaacaaccaccagctgaacgatgatacggatacggttgggtatcgtcttgcgcagcagtgaaatcactacattggagaatgctgtaatcaccgtcactgaaagacccatcacaatggcaggctccagtttggcagtaacagccaaagcagaacagatacccaatacctgcacggtaacggggttgttcagtcccagcggagtagagaatacttctttattcttctttgaaaacaattgtcccatattcttattcctcctcattattattagttaaaaagttcttgtagctgctcagacaagccttcaacatggcatccacacctacagaagtgatggtaccaccggaaatgccgtccacctgatagtcaggtttctctaccttgccgttcttcacaacaccgaggatcacctcgccgttctccaacgttttctttccggggaactctccctggaaatgcgtgctggcgatttcggcacccagacccggagtctcactggcatgagagaagtaaacaccataaacggtatccttgtcgctgttcagcgcaacatatccccagatagcgccccaaagaccggcaccgtaaacagggaatacatatttcttctcaccgtcaacctctgccacgaatacgtgcagacggttattttctttggcttccttctcgtaagcggtagcaaatgcaccggtattctctgtcagagtaccgtcaacgttcatcagcatatcgccctttacatatttattatattcagcttcggcatccttcacgtccttgatgttgagtgcagcaagaatctgcttcttcgtgtcaagttccacattcttgttctgcgtctcgcgcaaggaagaacttacgaatgccagcaggaatgcaacgataacaaccattaccgaagcataaatgatagtataactattactattggtattcatttcttttccggtatttaattgttagacttgattgcacgtttttcgcgacggctgatgttaccctgtaccacacagtagtcaatcagcggagcgaagatattcatcagcaggatggcaagcatcataccttcggggtaaccaggattgagcacacggataatgatagccatggcaccaatcaggaatccgaagatgtacttaccagtctctgtacgtgccgatgtaacggggtcggtagccatgaacacggcaccgaagcagaaaccgcccagcacgaggtgttcgtaccaaggcatctgtgccatcggagtgtcgggaccgattgcattgaacacccatgccatgaaggcaccgcctacgaatacggagaacatcgttttccagcttgcaatgcccgtccacaacagcagaatggcacccagagcgatggcgataacgcttgtctcaccgatagaacccggaataaggccggtcaccatgtcccaggagaactccggaacggcgcccgaggtagcggctgcacccaacggagtagctaccgtcagaccatctaccgactgtcccagaccgaagatactgtcgcccgatacccaaacggcatcaccggacatcttcgtaggataggcgaagaataagaatgcacgggtaatcaaagctacgttgaacacgttcatacccgtaccaccgaatacttccttagcaaaaattacagagaatgcagtagccaccgccagaatccacaacgggcagtctaccggaacaatcatcggaatcaagataccggaaaccaagaagccttcctgaatctcctccttcttccactgagccactacgaactcaatgccgagacctactacataagatacaatgatttttggcaatacagccagaaaaccgtagatgaacatttcccagaagcctccggcagcaccggtagcgtggaaatgctggtaacctacgttatacataccgaacagcagcgccggtactaacgcaatgaccaccatcgacatgatgcgtttgctgtcaatggagtcgtgaatatgcgttcccgatttcgaagtggcattgggcacgaacaggaatgtttcgaagccatcaaacaccgaacgaaatgcgtggaatttgccgccttcctcaaagttcggctttatcttgtcgagataatttcttaacgctttcattaatatatttacgattttacgatttacaatttacgatttgccatacgccccgattatgccatttcggcacgaagcatatcgagccctgcacgtacgatgcgctgcacttccactttggaagaacatacgaattcgcagagagcgaagtcttcgggagctacttcgtagatgcccagagcctccatacggtcgatgtcacctgcaatgattgctttcaccaagtattcggggaagatgtccatcggaaatacgcggtcgtattcgttggacataatcatgtgacgttcaccacccttgatacgggcatctatcacatattccttcttgcccatcaaccagctgaagtaagagcggttgacgctgaactgattgaaacgcggcataatccaacccaacatttcatggatttcatctccttcgggaataacggtcaattggctgtcgaaagagccgaggaagccgttcggagaaactttcttaccggtcagcacgttgccgctgatgtagcggaggtctttgtcggtagtcacgttacctttgaaaacgttcgtcaacagagcgccgactttcagcttgcaataagcgggtttcaacacttcggaacccgttacagccaccgtacgggtcatgtccacacgaccggtattcatcagacgtccgatgaagagtacggcttcggcactgatggtccagaccgtttcacccttcactaccggagagatgtggttaatctgtacacccacgttgcctgccggatgtggtccgtcgaaagctgttacggtaacgttctttgcctgcacaagagcagcagacttttgttttacactaatacccagatacgtctttgccatctttgacaaagcgtcgagtcccgtctggaagtttgcttcttctcccttcagcgcgaattcaaaatcgggagccagcggattgctgtcgaaagccgaaatgaagatagctttcggagttaccgtcggatcagcgataacgtcgtacggacgttggcggatgaaagcgaacatacctgcttgcaaaagagcttcttttacttgctggccgctcatcttggacgggtccatcttgccgaattcctcatagtcttgctcagtggcagcctctacgacgatgttcagcaccttgcggcgtgcaccacgctccacgcttgtcactacgccgctaacgggcgaaacaaatttcaattcaggatgattcttgtcgataaacaagggtcccccggccatcacatattcctgctctttgaccaccactttcggagtgatgcctgtatagtcatcgggaaccagcgaatagaatcccggttccttaacagacacaagttcctgggcagcagcgcctttcaggttgatgtcaaggcctttacgtaacttaattacatttgccatgcgtttatttaaaataatggtttcattaatttgccgcaaaagtagcaaaaaagaacgtgaataaagagtaaaaaagaaaggaattacggagaaatttccgtaatccctttcgttaacgaacacgagaacaaggattaggggttaaggattagggattaataccctgcggaatcatagtgcagcccactaatccttaatccctaacccctaatccttatcatcacttttcttcagcgaacatcgggtcccatgccggcaggcggacgggcttttgtttaaacagttccatcactttggcgggaacatactttgtctccactaccagacggaacatgtattcattgaaccactcgtcggtcatgatgagatgtccctgataaccggaagcggctccccaactgttctctaccatccactttacgggctttccgtctttgttcaagtcaacggccatcaaggtcatggcgtgggaagagccactggagaaagtctggatacgttgcttcttgtccatcccgaaggtggtgcccatcagtgattcgtagtcatagtttttcacatcgagcagaccgcgttcggagttcaggaacttgcccacatcgcaagagaagtacatcatggtgctgtccttcaaggaggcaatggccatctctttgatgtcctctacgggcaggttgacataagtccagttcttgccgtcgtaacggtggcggtcatagtctatttcatagcacttgtaatactcgcgactggggtcgttcatcagcattacgtagttggtcagcagttgtttgtctccatatttctcaaggaaagacatgggagtgtgatgctctgtctccacaggattacccttggcatcgtggcggacatagtcgaactccgtgggaggtacaccgaggttcagcaccagcatgcggtagatggttccgagcatcgtagttttctccttctccagagcttcgggcttggcaccggcggcagccatgtcacgcagttgcagaccatactctttcagcttcagagagatgaggttggccatgcgggaggtattttcactgctgtttgtttcgggcatggcatctttgggaacaaggccgtatttggaaacaatgtcggccacaccggtaaaggtacccccatcgctcagcggatgctggaagagccattccacggtcttatcagtcaggggactcttggaggtgtcgatgatgccttgcaagaagaggtttgccttctccaactggtcccagaagaagggatagacttcggagaactcaaaagactggaaaccgtattcggcaagggtcttggcacgcatcacattcagccccgtaaacagccagcagcggccagacgacttctggtcggtgatacctttggattctaccttgatggagaagtgggtatccatgccctgcatattctcctggttgagtgccagtttacggatgtcattattgcctatggcattgcggagcgccttgtcggcagccgtgccttgataactttgcttgatttgtccaagcatttcggggctgatacccccttttccctcttgtgcctgcacagagaacagtgcggcactcagaacaattacagataaaaatcgtttcttcattcagattatgtgtttttagttattgatgtcttgcttcgtgaagcagacaaaagtaatgtcttttttgataattttagtgacatctttagatttattatctattacagtgaaaactattcgggataaaatagtttcctttgcacccacatttcgtacgacatgaaaagatatatactaagcattatcgcactggtgctgttcgccaccaccttttatgcccaggaacagactgcggccgccacaaacgacagcgttcctgcactgaccaaaaaagaactacgcaagcaaaaggtagcgcgtcggaatctgcattacaatattctgggcggacccagctacacccccgacttcggtgccgtgctgggaggaagcgccctaatgaccttccgtatgaaccccagcgacaccacgcagctgcgctccgtagtgcccatggccatcgccttcatgttcaacggtggcatcaatctcttctccaaaccgcaactcttctttaagggcgaccgtttccgtatcttcggaaagttcagctataaaaatacggaagaaaacttttacggcatcggctataataccaataaagattatgtacgaagcgacagtaccagcaaataccggtacagcggcgtgcaaatcaacccctggttccttttccgactgggcaacagcaatatctttgccggacctcaaatcgacatcaattacgaccacttgacggagcccggcaagttcttggtggacgaaccctcgtacaaagaggcaggcggtacggctaatggctataacaacttcaactccggcctcggtttcctgctgacatacgacagccgtgacgtccctgccaacgcctaccgtggtatgtatctggatttccgcggcatgatgtacgccaagttcatcggcagcgaccagaccttctaccgcctggagatagactaccgccaatacaaatcactgggcaagcgcagggtacttgcgtggacggcacagaccaagaacgtgttcggcgacgtccctctgacgcaatatgccctcaccggaacgcctttcgacctgcgcggctactacatggggcaatatcgcgacaagtcctcgcatgtggtcatggcggagtacagacagatgctcaataccgaccgcagcacttggttgaagcggatgctcaaccacatagggtttgtagcctggaccggctgcggcttcatgggccccactcccggcaagatagagggtgtactgcccaactatggtgtaggtctgcgcattgaggtacagccacgcatgaacgtccgcctggatttaggcaaaaacacggtaaacaaccagatgttgttttacttcaatatgacagaagcgttttgagtaacgccctgcctacctgcccatccctttcctatggagaatgatgattgaaagcctttaatctcctctcactcaaaaggttattcaagctcacctctataggaagcccacttccttataacatcgaaacaccttgagaaacaaacattaccccttgagaaacaaacattttatttttcttttctttttcttgcatcggtaaaagattatccatacttttggcaatcacatttctttttatcaaaaaagaaagcaaacgagcggatacatgaaagcctttgaagtactcttctggataagtttattcatagtgttctatacttatataggatatggtatactattatatatcctggtcaagataaaagaatgtttccgtaagcctgcgccccgtccgatgcctgccgacgatgctttacccccattgacgctatttatcgccgcctacaacgaagaagatgtagtggatgaaaaaatgcacaactgcctggagctggattatcccgccgacaagctacgcatcctctgggtgaccgacggcagcaacgaccataccaacgaacgcctctcccactggccgcaagccatcgtcctccaccaaccccaacgccaaggcaagacagccgccctgaaccgcggtatacatttcgtagaaacgccccttgtcgtgttcaccgatgccaatactcacctcaaccgcgaagccctgcgggagatagtgcacgccttcaccgaccctaaagtgggatgcgtggcaggcgaaaaacgtatcgccgtgcaaagcaaggacaatgctgcctcggggggagaagggctatactggaaatacgaatccaccctcaaagcgctcgacgcacgcctctattcggcagtaggcgcagcgggtgaactgtttgccgtgcgccgcgagctgttcgaggaaatgcagacagatacgctgctcgacgacttcatactctccctgcgcatcgtcatgcagggacacaccattgcctattgtgccaatgcctatgccgtagaaagcggctcggcagacatgcgcgaagaagaaaagcgcaaggtgcgcatcgctgccgggggcttgcaatccatctggcggctgcgtccgctgctcaacccattccgttacggcacattctgtttccaatatatttcccaccgggtgctgcgctggtcgctcactcctatcctattgttcctattgcttcccctcaacacaattctcatctttacgacaagcacgccattactgtatgccatcatctggctgttacaagctcttttctacctcatgggaagttgggggtactacctttcaatgaagcatataaaaaataagatacttttcatcccctactatttcctcttcatgaacgtcaacgtcatacgaggattcaactacctgcacaagcgcacaggcaatgcaagcggcgcatgggagaaggccagaagggcatgaaactaatactgtaagaatgaaaaacattttgaaacaagctgaaaacgccgagagactgttgaagctgacgtcagataccatgctccttctgaaccgggacggcatttgcatggacatcgcagtgcacaatgtaaacctttggttcatgaaggaagaaaagctgctgggcaagaatctgttccaactgataccgccgtccacttactaccaagtatatccggagttcaagaaggtactgacgcaaaaggtacgttcagtccataattacgaaatgacactgggtcacactacctattactttaaatgcatcatgtacccgtacgacggcatggtcctctgccagtaccgcgacatcacagaacgcagccagcgcaaactggaactcgaaaagaaaaaccacgagctcaacgaaatacaaaaggccgccctcatcggaaactggcaatacgatacccagacccgcatattctgttatgcaggccatacgggtatcatgtgttcggaagaggtgcagcacatcaatatggacaattatctggaacttatccttcctgaagaccggaaaagctttaccggctggatgaaagagaatctgaaaggcaagatggaaaacagcgtggactaccgcatcttcctcaaaggaaacattttctatatccgcctcaaagcgtttgcccgcgaacggcagaaagacgggaatgtcactatagaaggatacatacagaacattaccgacatacagaaacggcgcaacgacatcaatctgctgacacatgccatcaacaactccaccgaggacatttattcggcacacgaagacggcacgctgatattctgcaaccgttgcttcaaggaacggcatggcatcggtaatggccaagacatcacccggatgaagatatacgacctgccctcatacggcagggatgaaacatcctggaaagagtttgccaaccgtgtcaaacgtggagagacgaaccacggatacatcgtctaccatccgctgcccaagcgtccggaagtactcgccattgaaggaaacgcttattgggtgacaagcgacaaaggggaaggaaccatctggacattcggaagagacgtatcgacacgcatccggcatgagcagcaaatcaaacagttcaaccagattttggacaaaatcatcgaaaacctcccggcaggcattgttgtgaaggacatcaacaacaacttcaagtacctctaccgcaaccgcgaatcgtataaccgcgaaatccccatacaagaggcattgggaaaggacgacttcgatttttatcctctggagactgctcaggaaaagagggcgcaagacatcgaaatagccagaaccggcaaagagatgcactggattgcggaagaacgcgacggaaacggaaatcccatctatctggacaaacggaagatgaagattgaaagcaacgacttctcccccatcctgctgaacatcgaatgggacatcacggaaatggaacagatgaaacgggaactgctcgtagccaaggagaaagccgagacctccgaccggctcaaatctgcctttctcgccaacatgagccacgagatacgcacaccgctcaatgccattgtaggcttctcacgaattattgccgaaagtaccgacgaggaagaacggctaggctattacgaaatagtggaatcgaacaacgaacgcctgctccagctcattaacgaaatcctcgacttatcaaaaatagaatcgggcatcgtggagttcaccatcacgcccgtacgcctccatccactctgcaaggagatacacgacgcacatattttccgctgtcccgaaggagtggaactgatatacgaaccctctgacgagaatatcgtgattgacggagacaagaaccggattttccaggtcatttccaatctgataggcaatgccttcaagttcaccaccaccgggcacatcagttacgggtatcgccgggaaggcaagtatgtagcattccacgtcaccgatacgggtatgggcattgcaccggacaaggtggaccgggtattcgaacgtttcgtcaaggtgaacaactttgcccagggcaccggattgggactttctatctgcaaaaccatcatcgaacgtctgggtggcaacatatccgtcacttcagaggtgggtaaaggcaccacatttacttttgttctcccgctggaatccaccagcaaaacagaggcggaaaagaaagaagaggacaaccaggaaacgacagcagagacacactccacagagcagaggggcaaaaatgcagcccccggagattccccgaagaatgaagaggtcggagcactccctacccctccttccaagaccatcctgattgccgaagatacagaaagcaacttcatcctaattaacgccattttaggccgactctatcggctgaaacatgccaaagacggcatggaagccgtaacgatgttcgaggaagtccaccccgacctcatcttgatggacatgaaaatgcccaaccttggcggaatcgacgccactcgcatcatccgtgaactggtaccggacgtccccatcatcgcccttacagcctatgcctacgagcacgacaagcaagctgccctggaagcaggttgcaacgacttccttaccaaacccttcactcaagaagtgctgaaggaaaccatcaagaaatggctggatgataaaggatgactgaaaaacagtcatcctccactttatgcaaaaatatcacttcgctggatataagcaatcacatcccctttattgaccacatccccttgcttggcacagacttccaccacacgtccggtaaatccggtccatatcttctcgtattcgccccacggcgtagagatgtagcagaacacctcatcatgctggtacttgcgtccgatgaaaggagcagaagaaggaccttcgacggaaacctcccaaagcacttgccccttggaaggcgcgattatcgggtctgccttggcacgcttcagcttcttgatttcttcttccgagtatccgtttttggccatcgccgcatccttggcacgctgcaggtcatcctcaaaacgtttcttggcaacgccggatttatagtcgcgatactgtcggtcgtgcatggcaagctcgaagagttcctcgtcatcatcgccatattcccaaccgttttcgtccatctctttccggtatgtatccagagcatccgggtagttcagctgcgggtccgtatccacgaactcaaagcctttggacttagccagttccactatctcgggcgctaaagtaccggggaggcgtccactcttgcccagaatcatgtcccacgtatggttgtctatcatcgtccaacgctcctctccctttacctgctgcatgaggttcatcaaagccacattcttcacatactggctgaaaggagtcaccaaaggaggataacccagcttgggccatacatattccacttcgtcgaacagcatgacgagcaggtcgtccagactgagttccggctcgttcttaccgcgcagtatcatgttgatgccggaatgcactcccttcaagtcggccatcatggagcccatcatgccacccggcaaaccgcacttcagcaagagtgaggacatatgtttattggtggggtccatgaaataacccaagaactcgtcaatgaactcctgcgtcatggcacgggctttcatgtaggctttcatgtttatgtcgggcacttggaaacccaggtctttcagcatggcctgcacggagatgatgtccggatgaaccttgccccacgacatgggttccatcgccacatcgatgatgtcggcaccgttctcacagacttcgagaatggaagccatggaaagtccgggaccgctatgcccgtggtattgtatcagcacatcggggtgcttctccttaatggttctgacaagctgtcccagcatacccggacgtccgatgcccgccatatccttcaagcagatttcaggtgccccggcttcaatcaaccggtcggcaatactggcatagtattccaccgtatggacgggagaatacgtgatgcagagcgtagcctgcggtatcatgcccgcttccagagcatatttgatagaaggaattatattccgcgtctcgttcaatccgcagaagatacgggtaatgtccacaccctgggcatgcttcaccttgtacatcagccggcgcacatctgccggaacgggatacatgcgcagtgcatttagcccgcggtcgagcatatgcgtctgtatgcctgcttccctaaaaggtgcggtaaaggcgcgtacagccttgttgggattttcaccatacagaaggtttacctgctcaaaagctcctccgtttgtttcaacgcgtgcaaaacaacccatttcaactatcaacggagcaatacgtaccaactggtctacccggggttgatacttaccggacgactgccacatgtcccggtaaacaagactgaatttaatttcctttttcatcatagtcagtaataagagattttttccttcggttaacttaacatatacaaatataaaggattattctggcatatagtcaagaataacccttaaaaattcatcactgacaatatgttatatatcatattgctactatcaaattattatcagatgaaatctttcaattcatcctgcaacttctggcgcgtaaagaagatgcggcttttcaccgttccgagcggaaggccgaggcgttcggcaatctcgcggtacttgaaaccggacacatgcatggagaaagggactttatagtcgcgtggaagggcattgacgatgcgatgcatttctttcaggtcgtaggcaccctcggtactggcaaaaccagagtcctggggcatgctgaggtgatactgattgtccgtctggtccacaaaagtctgttcgcgaactattttccggtaattattgataaagatgttgcgcataatggtatacatccaacctctgaaattggtgtcgggttcaaatttgtcttcgttatccaaagccttgagagatgtctcttgcaacaaatcattcgcttcttcccggtcggctgtcaacttgtatgcaaagcgaagcagttcttcttgcactgcaagcaaatcttttctaaaactgtaagtattcatactttgctcaatttttaaatagttaataatggtttaggttttacgattgcaagtataaggaagatttgaagccccgggggacggaatacggtttttattaggggtgaaaactatcatttgacagtttacccccccctctctgatagtttacgggtgatattatatactgaaaactatcatttttccgaagatttcgtaaatgttacgtgatttttttatagctttgcctacatataggaaaacacttttattacataaaaacactttattttatgaaatcatttcaatttaagtcacttcttctgctgactacccttatcatttccctgccctccttcggacaaggactgaaggcgttcaagctgaagaacggtctttccgtatatatatgggaagatgaatccaaatcggacgtgttcggactggtaggcgtacgtgccggttccatcaacgaccccgaagagtacacgggacttgcacactacctggagcacgtcatgtttaaaggaacagacaagataggcgcgctgaactggacggaagaagaaccgatctacaaggaaatcatcgccaagtacgaccagatggccgaagaagccgacccggcaaaaaaagaagccatcagcaaggaaatcaatgagctgaccgtcaaagctgggaaattgggacttcccaacgaatactccaacctgatggaaagcatgggtgccaaaggggtgaatgcaggcacctactatgactggaccttctatcacagctccttccctgcctatcagataaacaaatggctggaaatctcctcacaacgtttcctgcatcccgtattccgttccttccagtcggagctggaaaacgtgtacgaagaatataaccgttcacaagatgaccagggacgtgcacagaaccagttcgtgatggagaaagcttttgagggacatccttactcccgttccatcatcggcctgcccgaacatttgaagaatccccgcctgagcaagctgattgaattttacgaacaatggtatgtccccgaaaacatggtactggtactcgtaggaaacatcaaagcccaacaaatcagcggacgcatcaatgccgccttcggacgtctggctgctaaaccctcacccgagcgcaaggtctaccagaacctcgaaataaagggccgcaaacagtattcggctaaagtaggattctacccgcaagtggcaatggtattcaatggagtacctgccggacatcccgacgaagacgctctggacatcgccctggcactgctgaacaacaacagtcagaccggaactatggacaagctggtactggacggtgaactgaccagcgccggagcctacacccgtactttccgcgaacaaggacgcgccatcgtagcggccattcccctctacgacgaaaaccagcgccgtttcgagtcgaccaagagcgccgaaaagaaagccttgaaagccatccagcaaatcgccaacggagaattcgaggactggaaaattgatgccatcaaagccgagaaatgccgccagttcgacctggaaatggagtcgaacgaggacaaggccatgatactgatgaacgccttctacaacgagcaggacttgggcgacatactcaattacaaggacaagattatggccatcaccactgacgacatcaagcgagtagccaagaaatatctgtcagacaattacctggccctatatatcgaaaaaggaaagcctgacaagaacgccaagattgagaagccgggttacaaacccgtagaacctccgataggaaaagaatcgctctatgcaacacaattcaaaaacctgcccatcggacagatggaggagaaattcgcagactacggcgaagtgcaaatcaagcaactgaacgaccgttcaaagatgtactacacacccaacaaggagaataacgtattccagttggttgtacaatacggagccggtgaacgcgaattcccaaaacttggctatgccgcccagttgatgaacaacgcaggcatcatgggggcctacgaaccgcaagagttgaaagaagaactcagcaagctgaacgcaacctgccacgtgacagccgatgatgacaacctctacatcatcatggagggctacgaagccaccctgccgcaagcctgccagctactttcacgccagattttgatgccaaaactggacgaaaagcaactggcacgtctgaaaggttcggcaatgggtatgcgccagcagcgcaaagacaacgtcagcatcctgaacgaagcactgcggcagtacatgctctacggagagaaatcagactacatcaaggaactgaccgacaaggagatttacgaattacagatttcagaactgacgggcgacatcaaccgcgcctccaactacgaggcaaaggtgttcttcaccggaacactccccttcgaccaagtatacgatatcctgagcaagaacctcccattggtggccaacgaacgcccgtccaactccccacaggcaaaggacatgatgccggtgaccgaaaacaccgtctacttcctgcctaacaacgatgcagaacaagcccaaatccacctctacatcccgatgcagaaggctgacaaaaaggacgacgtgctgcgtagcgcattcaaccaatacttcggtcttgacttcaccggcatcgttctgaacgaaatccgcgaaaaacgctccatggcctatacagcctacgcattcgtcggcacgcaaggcatagccggaaaagcaagttatctgcgcggctacatcggtacccagaacgacaaggcaaacgatgcattggacgtactgatgggtctcgtcaacgacatgccgaaaaatccggaacgtatcgacaacatcaagagctacctccgccaagccatgctgaccagtcaccccagcttccgcaacaaagccatggaactggtagacttgggctacagaggctacacagacgacccagcaaaggaaaacctgccgaaagtagatgcactgacctttgacgacatcgtgaaattctacgaagagaacatcaaagacaaaccttactgcatttccatcatgggcaacccaaagaacattgacctgaagcgactggaaaaattcggcaaggtagtgaaactgaacgaacgcaaacttttcaacacgaaggatgcattgttctaaccttgttttatccctttagcaatcccatcctccttcccccttatcaggggaacgaggaatatgaaagattccccgacatttcggttccaaatgccggggaatcttatttttaacacctgaagttcttttgcacattgcccggaatttcaccggaaaatccctgagattctcagacagcagataacggactacccttcctgctcctcttcattgcccgaaaggataggcaggcaaatcctatacttcaccgccagtatgcgggtaacgaacaccgtcacaccgcccacaatctgacacacgaaagactccatccccagaagatggcacatccagtagaaggttcctcccaccacacaagccatcgcataaatctccttccggaatatcagcggaatttcgttaatgaatacgtcacgtatcacacctcccgcagccccggtgatgctgcccataatgatggccacccagaagggatagcccagcgcgatgctcttgcccacgccgaccaccgtgaacagtgccaggccgatactgtcgaatatgaagaacgtattgtgcagatggatgagatgtttaccgaagaggatgacccacaacaaggccagtccggtacaaatcaagtaaatgggatccgtcatccagcccggggtgacgtccagcaacaggtcgcgtatcgtaccgccgccaatggccgtcacaaaacccaccacatacgctccaaaccagtcgaaccgcttggccgaggccaggcgtatgccactgatggcaaaggcaaatgtgccaatgaaatcgagtatctgaacaaatgttggcattatcactttgagaattaaaaattataaattataaattaaacattgaataagtgtgtattttcaacagacactctgaaaataataggcaaagtaacaaataatttccctaagaaaacgtatttttgtcgtatcatttttcaccaactacgacaatgagaataacaatcgtatcgggcgcacgccccaacttcatgaaaatagcccccatctgccgcgccatcgacgccgccagagaggcaggaaagaacatctcctaccgcatcgtctacaccggtccgcaggatgacaccagcctggatgcctcgctcttctccgacctttccatgaggaaaccggatgcctacctcggtgtcaccggacacaaccactcgcaggtggcagcctccatcatgctcgccttcgagcgggagttggacgggcatccggcacaagtcgtactggtggtagatgacatgaccgccactatgagctgctccatcgtcgccaagaagcgcggactgaaggtggcgcacgtcatagccggcacacgctctttcgacatgaacatgccccgcgaggtgaaccgcaccatcgtggacgccatttccgactatctcttcaccgccggcatggtggccaaccgcaacctcaaccaggagggcatgatacccgaatatatccactacgtgggcaacatactaattgacaccatccgtttcaaccgccaccgcctggtgcagcccatgtggttctccagcctcggcctgcggaaagggaactacctgctgctcaccctcaaccgccgcgacctgctggagaagaaagccgtactgcactccctgctccagaccgtcatcgagaaggccggcggcatgcctatcgtcgccccgctacacccctacgtgcaaaaggcggtgaagtcgctggaagtgaatgctaccaacctgcacatcctgcctccgcagagttacctgcacttcggattcctcatcaaccaggcacggggcatcgtcaccgactcgggaaacatcgccgaagaagctaccttcctcgacgtcccctgcatcaccctcaatacctatgccgagcatcccgaaacctggcgcatcggtaccaacgagctggtaggcgaaaattccttcgccctctccgcctcgctcgacaagctgctgcacggagaatggaagcacaccaccctgcccgaccgctgggacggacgaacggcggaacgcatcgtacaaacactactgaacggcaacaattcataatcctccataaactctatcccaagcttgcaaacgtctatcccaaacctacggacgcttatcccaagcttgggtctttctatcccaaggcttgggatagaactttctccatacgtcgtgcaactttatcctttatatccggcaacttttctataaggattctgtacgttttttatctgtatccggcaaacaagacatacgactttcacgttcatttaaccatatctcccgtttctttagtctatatttgcttcttgattaaccttaatttgttaactttgtgcccgaattatctgtaacttatgaagcaaagatatacaatttacgcccttttcctgctgtcactgttcgtctccatcagcgcatccgcccagataaagggtgtcatcacagactccctcacgaacgaaccactgatgtacatcaccgtacagtatgaagggaaaggtgtaggcggcatctccaacgcaaacggtgaataccaggtggaaacccgcaaaggctgggatgagctgacgttctccgccgtaggctatatcaccaagaaagtaaaactgaaacccggcacccgggtgctgaacgtcaaactgcaatcggatgacatcatgctctccgaggtcgtggtgaagcccaaaaaggagaaatattcccgcaagaacaaccccgccgtggagttcatgaagaaggtcatcgagaataagaaggcactgaaactggaagagaacgactactaccagtaccagaagtacgaaaagatgaagatgtcgctcaacgacgtcacccctgacaaaatggagaaaggcatctacaagaaattctccttcttcaaagaccaggtggaggtatcacccaagaccaacaaaatgattctacccatctccatcaaggagacggccagcaagaccattttccgtaaaaaccccaagagcgaaaagaccatcatcgaaggtatgaactccaccggtatcgaagagttcttcaacaccggagacatgctggggaccatccttacggacgtattctccgacatcaacatctacgacgacgacatccgcctgctgcaacgccgcttcgtcagccccatcggccgcggagccatcagcttctacaaatactacttgatggacacgctcatggtggataggcaggagtgcgtgcatctgactttcgttccccagaacccgcaggacttcggtttcacggggcacctctacgtggtgaaggactccacctatgccgtgaagaaatgtaccatgaacctgcccaagaagacgggtgtcaacttcgtggaaaacctcgacatcgtgcagcagttcgaacaactgcccgacggaaactgggtgctgaccgatgacgacatgaccgtggaactgcactttgtgaaaggcatccaaggcctggaagtacagcggaccaccaagtacagcgactatcagttcacagagatagaaccccgcctcttccgcctgaaaggaaatgtcatcaaggaggcgaacatgcttgccaagagcgacgagtattgggcgaaagtgcgccaagtgcctctcaccaagaaggagagcacgatggacgtattcatgaaccgtatcgaacagattcccggcttcaagtacgtcatcttcggagcgaaagccttgattgagaacttcgtggaaacgggcagcaagaagcatcccagtaagttcgacttcggtcctatcaatacaatgataaccagcaactacgtcaacggcacccgtttccgtctgagcggtatgacaaccggtaacctcgacccgcattggagcctaagcggttacggcgcctacggaaccaaggacaagaaatggttctactccgggcaggtggcctactccttcaacaaacgcgaatacgtattgtgggagttcccgaagcactacatcgccttcaagtacacctacgacgtgatgtctcccatggacaagtacctcgccacggacaaggacaacttgtttgtcggctggaaatggaccacggtagaccagatgtcctacatgcgcgacgccacgctgacctacgagctggagaccaataccggcttctccatccaggccatggcacgccaccgcaacgaccagcctgcggggcaactgcaatactggaagaacaacggagaaacacccggacagtgggatgaaaagaatacgctggtgcacgacatcaccactaccgagctgggtgtgaccctgcgttacgctcccggcgaaaccttcgtcaacaccaagcagcgccgcgtgcccgtatcgttggatgcgcccaccttcaccctctcccacaccgccggattcaagggtgtgctgggtggagagtacaacttcaacctgacggaagccagcatccggaagcgcttctggctcggctcgtggggcaagctggacgtaacggcacgtgccggtgcgcaatggaacaccgttcccttccccctgctgaacctaccgatggcaaacctctcgtacatcacgcagaacaacgagtccttcaacctcatcaacaacatggagttcctgaacgaccgttacgcctccctcaacctaagctatgacatgaacggaaaactcttcaaccgcatcccgctcatcaagaagctgaagtggcgtgagatgttccgcatccgtggtctgtggggcacgctgacggacaagaacaacccatacaagagcaacaatcccgacttgttcctcttccccatgcgcgacggtgtacccaccagccacgtcatgggcaagactccctatgtggaagccagtgtaggtatctacaatatcttcaagctgctccacatagaatatgtacgccgactgacctatacggatataccgggagtgaagaagggcggtatacgcttcatgatattaatgattttttaagagttacatactatgcaaccattagcagaacggcttagaccaagaacattagatgaatatatcggtcagaaacatttagtgggaccgggtgcagtgctgcgtaagatgattgatgcaggacgtatctcttcgtttatcttatggggccctccgggagtgggaaagacaaccctggcacagattatcgccaacaagctggaaacccctttctatacacttagtgccgtgaccagcggtgtgaaggatgtacgcgacgtgatagagcgtgccaagagcaaccgcttcttctcgcaagccagtcccatcctcttcatcgacgagatacaccgtttcagcaagtcgcagcaagactcgctgttgggagccgtggagcaaggcaccgtgacgctgataggcgccaccacggagaacccttcgttcgaggtcatccgcccgctactatcccgctgccagctctataccctgaagtcactggagaaggacgacctgctggaactgctgcaacgcgccatcaccacggacaccgtgctgaaggaacggaaaatagaactgaaagaaaccactgccatgctccgcttcagcggaggagacgcccgcaagctgctcaacatcctcgaactggtgatagattccgaagccaccgaccctgtcctcatcacggatgacatggtgaccgaacgccttcaacagaaccctcttgcttacgacaaggacggcgagatgcactacgacatcatctccgctttcatcaaatccattcgcggcagcgacccggatggcgccatctactggctggcacgcatggtagaaggcggtgaagaccctgccttcatagcccgccgcctcgtcatctctgcctccgaagacatcggactggccaaccccaacgcgctgctgcttgccaacgcctgcttcgacacgctgatgaaagtgggatggcccgaaggacgtatccccctggcagaagccaccatatacctcgccaccagtcccaagagcaattcagcctatatggccatcaacaatgccctggaactggtacgcgaaacgggcaacctccccgtccccctgcacctacgcaatgcgcccaccaagctgatgaagcagttgggctacggcgagaagtataagtacgcccacgactaccccggcaacttcgtcaagcagcaattcctgcccgacgaactgaaagaccgccgcatctgggaaccacaactcaaccctgccgagcaaaagcataaggaacggatgcagcaactctggggagaggaaaagaaatggtaaactatcaattcaaattaaaaattgaaaattagagattaaaagtcggatacagaaaatccccacaacaaataactcataactcataactccatgaatatagtagtattagacggctatgccgccaaccccggtgacctttgctgggacgaattgcaagccttgggcgagtgcaccatctacgaccgcaccgcccctgcggaagtattggaacgcgccgctggtgcagaaatcctgctgaccaacaaaaccgtgctcaccgccgagcacatggcggcactgcccgaactgaagtatatcggtgtgctggccaccggatataacatcgtagacaccactgccgccaaagaacgcggaatcatcgtcaccaatattcccgcctacagcaccgactccgtagcccaaatggtctttgcccacatcctaaacatcacccagcaagtgcaacaccactccgaagaggtgcaccggggccgctggacagcaagcaaggacttctgtttctgggacacgccgctcatcgaactgcgcgaaaagaagctcggaatcgtaggcctgggccacaccggtttcaccaccgcccgcatcgccatcggcttcggtatgaaggtatgtgcctacacctccaagaccaacttccagcttcctcccgaaatccgcaagatggagctggacgagctgttccgcgaatgtgacatcatcagcctgcactgtcccctcaccgactccacccgcgagatggtaaatgcagaacggctccgactgatgaagcccaccgccatcctcatcaataccggacgcggcccgctcatcaacgaacaagaccttgccgacgcacttaacaacggtaccatctatgccgccggcgtagacgtactctcgcaagaacctccccgtgccgacaatccgttgctctctgcccgcaactgctacatcactccgcacattgcctgggcaagcaccgccgcgcgcgaacgcctcatgcagattatgctcgagaacatcaaggcctaccaagacggcaagccggtgaacgtagtgaataaataagcaaacaacatgggaaagtctgccgtaaaaggtctgttctacatctgcctgatagcagcgacatttatcttgggcgccatcaccatagtggcagccttctcaggaaacatggctccggtcgattccgtcatcatgccattactggggctggcagtgcccgtactcctgattgtcaatctgataacggcactctgctgggcattggcccgtaagcgctgggcactgattccgctggtggcattcttctgcaactggggatatctgacgtctgtcttccagctccacctgccgaaagacaagaccccggcaggcaagtatctgaagatagccacctacaacatacacaactttggaggtgagattaccggttattcctgcaaggagatagcccggtacatgcagcaggagggcgtggatgtgctgtgcttccaggagttcggagacaacagtgacttccccacagacagcatacggcgcgtactctcgcattggtcacacgcgctcatcccttctgaagactccgtcaagggcgtactgcctatcgccgtattcagccgctatccattggcgaaccaccgtttcatcacttaccagcacagctccaactgtagcatgatgtgcgatgtagtgatgggtacggataccatacgtctgataaacaaccacctgcagaccaccagcgttagccagaagcgcaggaagtgggaacgcgagctggccaccgacgacacccgccgcgaagtccaggcagccaaagatgccgcaggcaccctgcacgaaaacttcatgaagcgggccacgcagacttacgtcatcagccactacgctaagaccagcccctatcccgtgctgctatgcggcgacttcaactcaataccttcctcctacacctaccatcatttgaggaaaaccctcaaagacggattccgcactgccggaaacggatacatgtacacctaccgctatgccaaacgcatgttgcgtattgattacatcttccactcccctagcctgaagggtatcgaatactactctccggacctggatttgtgcagcgaccacaatccagtgattatggaggttgaaatacaataaagtaaagaaagccaaaaataataagggctgtcccggaaatcccggaacagcccttgccttatcatattctgccattcaacggaggttatctgcacccgattagttgaacacgtaacggataccgacttgcaacttccagcattcgctgtagttctgataggtgtcgtaagtcttggtaggatattcaccgttcaccttatacatggagaataccggagtcaggtcagtggcgctcttcaccccttcatacttcaggattcggttgctgttggaaacggtattggtcttggagataccccatttggagttgatgaggttacccacgttcatgatgtcgaaactcaactggaagcaatgcttggtcttgccaatcttgaattcgaaatcctccagcaaacggaagtcaaagcggtgcacccacggagcgcgggcagcataagcctcggcatactgtcctttgtgattcttcaagtacgaatcctgctctacgaatttccagaaggcaacgcggtcttcctctgtcttgaagttgatttcactatcgtccttcggaatgtacatcaagtcgttgttgataccgtcgccgttcatgtcgttggtgtagcagaagctgtaaccgccggaagaatagccggaatagaacagattcaggtgtgtgccgcgaagcaggcctttgtgtctgaaggggatgtagtagcccacagaagcaatcaccttatcgggaaccacatactgtgaccgttgtgcatccacataattggaaccatcaatcgtgttcaatccctgccaagtagagatggggtcgctgcccggaagaccggaaacttctttggactccgtgtgcgtataggccagcatcagcatcaggtcgtccaccggctgggcattcaccgtgatgtttgccgtataaccgtaacctttggaagtattgtcgagcaccacggcattcttgccattgtaatgcacgaagtcgcctgcatatttcacattcttgtcggggttgtcataaagagaataagagtacaccatgcggttatccgcaccattgaaacgttgcatacccgtatgcagcagttccgtagttgtcacgtcttttccatcagcgcccttgacggtggtcagcttattgtacttccattcgtcggggttcttgatattgatgttgttgatggtaacggcattcacattctttgtaaacatgaactctcccgtcacggtcaaggggaaagatacgggtacctgatagtccaccgcgatagacgacttccacacctgcggcatcttgaagtcctgagccacaccggaaatcttgcttcccgccacgtgtttctcaatcgtggtggggaggttgaacttgtcgattatctggttcatgtccgtaatcatgccgcctgccaactggtccagacgggaatcatggcccaccacctttccattgtcatattgggtcttaaaggtaacggagttctgtaccatagaagcattggtcggcatattggtgaagaaaaccaacggcagacgtccggtaaacacacccgtacctccacgtactttcagcgacttgtccttgaacacgtcccaaacgaaacctatacggggagaaatctgccatctggaatccggccacttgccagtgtcgatgtgctgcccgtcgaagtcaagctcatagatggcatcgtttctctggaggtcgtcgttgtcgaacatcaagttgtcgaaacggataccgtaggtcagtttcagactgttgccgaggttccattcatcctgggcatagaaaccaagctggttgaaggtaacctgagcattggggttggccacaccgttgaagccataagtcaaagcgaatgattcgggagctgcgccactcaggaaatcttccagactgttatagcggtaatatcccgtaccgttacgcatataggcgttgttggcaaactggtgctcgtagctaagacctgccgtcagcttgtggttaccggtgaagaaggtgaagttatcggtaatgttcgtaatcttgttcttcacaccgttgttgtaggtgaacaactcgtaaccggcgctcatatacggttccagaatctggtttccgttctcgtccttgcctgccatgatgtcgataaaagggaaaggagaagagttggtgccgcgcatgtcctctatattggtgtaggtgaacagcagctgattggaaatcttatcggtgaagcggctgttcaaatctgccgcccaagactgcaccttgttgtccatggaatacatgctgttggcaaacgccatagactgtgtacctacgcggtaagtattgttcaggcgatatcccgtatcggaagagttgccgttcggggcattccaagccgtattcttcgtattgttgtagcggaggctcaagcgatggcggtccgtgatgttccagtcgatgcgggccagcagcttggtgttctcctcgtcggcagggaaattggtgtaggagcctgcatcatagccgtatttgtccttcagatggttgtacaccttctccatgtccgacttcagtgtacgggacaccatacctttcgcatcttcaccgtcctctcgcgcgcgatactttataacctctcccggagtcttctctttttcgtagttcacgaagaagaacagtttgttcttgatgataggaccgcccagcgtgaagccgtaggtagtcttggactcgtcggaacgtgctcccaggtcctcgccgttgatgcggttaccgcgcatgtcctggttgcggtaataggtataggcagtacctctgaacgtgttcgtaccactcttggtaatggcgttgatgccgccgcctatgaagttcgtctggcgcacgtcgaagggagccaccactacctgcacctcttcgatggcatccatggagatagggttgccgccgccgggaaggttggagctaagtccgaagttattgttgaagttggcaccgtcgatagtgaagttcgtggaacgtccgtcaccgccggcaaaactcatgccgttagcatagggagaaaggcgggcaatgtcactgatgctgcggttcacggtgggaagctgcgtcatctgtgcagacgagatattggtagtggcacccgtcttttcagcggtgaacttggtcttggcagccgtcacaatcacttcgttcagcaactcggaagattcactcatctctacgttcaggttgtatacctcacccagctgaagggtgatgtccttataaataaccgtctgatagccgatgtaggaaatctccacccggtagggaccaccggtgcgcataccctggatggaatagcgtccgtcaacgttggtcacggttccgtagcgcgaaccggaaggctggtgaacagcctggacagtggcgccgataatgggctcattacttgcatccgtcaccttacctgccatagaggcagtggtgacctgcgcatctacacccacggtggccagtaacagcagcaccgtcagtataattcttactctctttaacataatgtcttttaaattagtttcttaaaacgttatatttcttaaaacattggcaaagatacgcaaaattatatataaaggcattacaacgcgattacattttttaaggatttattcaatacaaggcagtaccactgtgaaacggcttccacggccttcctcggactggagttcgatgcgtcctcccatcttttcgacaatgagcacacagatggacaagcccagcccgacgccttgggaaaactcgctgcgcttgtagaaacgctcgaaaatcatcttctgctcgctgtgcggaatgcctatgccggtgtcttccacataaagatgtacctcgctcatgccggacggacagcaataccccagccggatgctgcctcctttcgtaaacttgttggcattgttcaggaagttggtgagtacctgtgtcagtcgcatggggtctacattcacctgcacatcttcgggagggaaatccttgaggaactgcaacggcggccggataagcaggctatgcgtctgatagacgtcatcgagcaaccggcacacgctctcccgctgaaaggtgaacgagaggttacccgactcgatgcgcgacagttccagcacatcgcccaccagcttcagcagcagtttggtattggtgttgataatgtccacaaactcctgccgctcttcgtttgaaaactccggctcattggccagcatgtccgagaagccgacaatggcattgagcggagtgcggatctcgtggctcatgttgttgaggaacgactgtttcagttcggcctgctccgccagctcgcgggattctatcagctcctgctcgtggtctttcagttcctggatattctgcagcaatccggctatgatgggtgcgtgtccgggggtgtggatggtattgtagctgaactcccaccactggaactcaccggtgaagttacagcgatactgccccttgtggtgcgtgcgttcatgccttgtcgctatgttcttgcggaaggcgggtaagtcgtcgggatggatgtagggagtgatttcatcgagcagaagacggccggggcgatgatgaataagctcgcaaaactgcgagtcgcaggacacggaatctccctccagtcgccaggcgtaggtagaatttccttcgatggccaggcagagggtctcatgctcgtagaggaggtttcgcaatgcctcacgcttgcgcctgcgttcgcgcagcaggctgaaggagagcaagactatcaccgtcagcacgaagactgcgcccaagatggaaccgataagtataggatagcggtagcgctccgaaaaagggatatacatcacagtgtactctgccggaatgctctcgagcgggatgccatacttctgcagcacatgccagttcagcacgtactgcttggcgcattccgtcacctgctgccggggcatccgcccttcgaggcgttccttgataccggtcgccatgtatcttatctggctttccagtggagtgaaatatcctcccagcaagtagtcggcaaagccgaagccctcgttgatggtctgaaacgtgggattgtcgaagagcatgcccacacgcttggtggtatagtctcgcttggtgtagagcagcaacgtattgtcgccgcgtcccagccacatcagatggcgtatcgctatggagtcgctcgtcatgcgcacaatcttcgtggtgtccagcaacacgtctatgttctgccgtttcagtatagggctgatagtctccctctcgcgcacacggtgataggaggaaccggcaaagtaagcaccctcggtagaggtcacgatggcgaacccctgcccacgacactgctcattcaacgcatgccatatcttgcggtccagaaacacttgtccgttcatcaggcagatgcgcgactttcccatgatactctctatcatgcgtatggtacgcaagtaatcgggcgtgtcggcatagcccgtgatgttggggtattgcaggagcagagatatgttgggatagttcacaccgctgaacacaacgggtatttcatgcgccaacgggtgtctgcatgccatcagcgcataggcagcctggtcgtcgagcacggctatcaactcggctccccaggcagagaggtcgtccacgaaaccggccatacggaggttttctgcctcctccatgtagcggtcgcagtccagatagtattcgcgtacatcgcagtccaagccgagaaggctgaactctttttgcaacagttccagagccttcgcagcaggcggatagcccggctcgaaagagtgtatcagcgcaatacgccgtgtctccgcatgggcagggtgtgcacacacgaggcagagagaaagaatcaatatgtatccggcaactgcctttatgtgcttcatatccggaaggtccttttcgacttgtatcagcaaagatacgaatgttttttaagaataatggactatttcttctgtttctgtaacaaagaatacgttttcttaaatcattgacacatcccaacttatctttcagaggatttaccgaatatccctaaagaaccgattcttcgtccagtattccaaagtggagatctatttgttcttaaccttcggcaacaccgcattcagtaccatatatcccaacataccggcaacaatcgttcccagcaatacaccaaacttcgcctggttcagcagatccggatattctcctgcaaaagaaaggttggcaataaataaagataccgtaaagccaataccccccaacaaggatactccggcaacacttctccaattcattcccggaggcattgaggacaaaccactcttgaccgccagccaggtaaacagaaaaataccgataaacttgccaagaagcaatcctgcagccaccgctatactaacagctccaacaacgccaccgcctccactgaacaccacaccggcattggcaaaggcaaagagcggcagtatcacaaagtttaccgcaccatgcaaattgtcttccagggattgcaaaggactaattacatgatcagaagcgcgctccacttgttttagagtggcaatctgctcattggtcaatataatattatctgatttggtaaccggaaaatcaccgataatgtcgcggatgcgtttaatgtatttcccggcatccaaacggggacgggccggtattacaaaggccagtatcactccggaaatagtgctgtgaatgcccgactgaaggaacaaataccaaataattaccccgataagcaggaagaatatcttctgtgtcataccgaatttccccatatagtaaaggaagaaataaaggacagcagctacaataagatatccgtatgccacttcggaactatagaaaatggcaataaccagaatgccgccaatatcatcgaccactgcaaatgccgtcaggaaaattttcagactcaaaggcacccgtttacccagcagactgagtacacccaatgaaaaagcaatatccgtagccatcggtatagccataccgcgcgtttccggagtaccctgaacgaccaaaagtgaatagacaatgaccggcaccaacataccgccacatgccgctacaaagggtaaagaagccttacgaaaggaagaaagttcacccaccagcagttcccgctttatctccaaccccacagccagaaagaaaacagtcatcaagcagtcgtttataaactcaatcattttcaacggatgaccgccatgggagaacaaattaaagtctccgatgcgcagatgcagttcctgcaaaagaaagccctgatacaacggagccatcggcgaattagcaataacggccgccaaaatagccatcaaaaacagcaagatgctcgccgctatattcagcgacgagaagtttttcacagtacgtaaaataatcataaagaagtatatttgatttaagatttcatcctttcgacatcaatccagcttcaagactgccaggaacgctttctgaggtacctccacattaccaatctgtttcatacgcttcttacctctcttctgtttctcaagcaattttcgtttacggctcacgtcacctccataacatttggccgttacgtccttacgcacagccttaatcgtttcccgggaaataatcttggcaccgatagcagcctgaatggcgatatcgaactgctgtctcggaatcaggtctttcaacttctcgcacatccggcgtcccaattcgtaggcattgtcaaagtgtgtcaaggtagaaagagcatccaccggctcaccgttcagcaaaatatccagcttcaccagtttggaaggacgaaaaccgttgggatgatagtcaaaagaggcatatcccttggagatactcttcaatttatcataaaaatcgatgactatttcgccaagaggcatgtcatagtatatttctacgcggttacctgaaatatattcctgcttcaccagctcgccacgcttgcccaggcaaagagtcatgataggaccgatgtaatcagtggtggtaatcaccgaagcacggatatagggctcctcaatacggtctatcatggtagggtcgggcatgctgccggggttatgcacttcggtcatatttccctgcttgtcatagatattgtaggaaacgttgggcacggtggtgataacgttcatgtcaaattcgcggtcaaggcgttcctgcacaatctccatatggagcagcccaaggaaaccgcaacggaaaccaaagcccaaagccaatgaagactcaggctggaaagtcagcgaagcatcattcaactgcagcttctccaaagaagaacgcaagtcctcgaaatcttctgcctcgatggggtacacaccggcaaaaaccatcggctttacctcctcaaaaccggcgatagcctcttcgcaaggacgggcaatatgcgtaatcgtatcacccactttcacttccttcgaggttttgatacccgagatgatatagcccacatcccccgtacgcaactccggacgtggcatcatttccattttgagcactccgatttcatccgcatcatattccttgcctgtattgaagaatttcactttatcccctttacgaatcacaccgttcactatcttgaaatatgcaatgataccacgaaaagaattgaagacagaatcgaaaatcaacgcctgcaacggagcttcctcgtcaccctccggatgagggatacgctcaatgaccgcagccagaatctcttccactcccatgcctgttttgccggaagcacggataatttcatcacgcttgcaacccaacagttcaacgatttcgtcctccacttcctcgggcatggcgcttgccatgtcacatttgttgatgacggggataatctccaaatcatgctcaatcgccatatagaggtttgaaatggtctgcgcctgcactccttgcgaagcatctacaataagcaaggctccttcacaagcggcgatggaacgtgacacctcgtacgagaagtccacgtgtcccggagtgtctatcaagttcagaatatacttttcacctttataggtatactccatttgtatggcatggctcttgatggtgatacctctttccttctcaaggtccatgtcatccagcatctgtccgttagttacttgtatagtattggtaaattccagcagacggtctgccaaggttgatttaccgtggtcgatatgggcaataatgcaaaaatttcgtatattcttcattgtcaataactatctattaattgggtgcgcaaagataatgaaaacagagcaaataaaaaaaatgcgttgataacatattcatgtaccaacgcatctttttataacattccaatcaattcctcgcttagttcagctttacaaacaattcgccttccacttcagaagtagaaaccttgtcttctcttaacaaccagcccaatcccaggaagaagtccttgtcgatcagtttagttgctttcttgatttgcttgtgagtcaagccatctgtgccattcagtgcagtccaaatctgtcctgcaacattaccagctttttcttttaacatttctatttgcttttagttaaacgttatcctcatctccaaagatagagatgtcggtgtttttatatcgctgcaaagataggtatatttatgttatacaacacgttattaggcactttttttcttactaaggggtaaaaaagttcttttttcttactttgaggacgttttttccaggtattcggtccaaatttgggcagctacctctaccatcctggcacacgggcgtttagcataatactgctcggtacgggcttccggaacggacgaaccttccggttttctcaaccccaacaattcagcacatatcaaagagccatttcgtttcttgaattcagcagccagctcctgcaccaacgcatagtttgccgccttaccttcacggtccttgccttccacagctcctttttccaatccggccaataggaacatgccgcatgcagcaccgcatgtctgcctcatacgacctatgccaccaccaaaagaggcggacatccggaaagcctgctcttctgtaaaaccatacatatctgcaaaagctcccactaccgattgcgaacagttatagccactcttgaaaagctccacagctttttcgattctgtcttttgtttccatcatcattattctgtaatttccaacaacatcggacaatggtccgaatgaacaacgtcacccaatattctcgcctccttcaacatcgggcgcaccggttcactcaccatgcaataatcaatgcgccaccctttgttcttggcacgtgaattaaagcgatagctccaccacgtatattcctgcttgtcgggatgaagccaacggaaggaatctatgaatcccgcattgagaaagcgcgtcatccactcccgctcttcaggcaggaagccactgttggtggcattcctgatagggtcgtgaatgtctattgcctcatggcagatattataatcgccgcaaagaatgagtttaggacgcgtacgttccagctccaatacatattcctggaatttctccaaccagaccatcttgaaggcctggcgttcgtcaccgctggtaccggaaggatgataaacactcacaacggacacatcaccgaagtcggcacggataaagcgcccttcgttatcgtattcttcgatacccataccatattccacatggtccggttcttgcttgctcagaatagcgactccactataccccttcttctgtgcagaatatagataatgcttataccccaaagcatccagcgcttctgccggatactgttccggttgcagcttcgtttcctgcaaacaaagcacatccggctgctcttgtgccagccactcgggaaaaccttttgtcacggcagcccgtagcccatttacgttatatgtaataatcttcatacttatttgatttcttagaaatgaattattcaagatgtcaactcggataccagcagcatgatattcagcacagtgaccaccgcagcaatggcataaagtacaaatgtactccatttactgtttacatactgccccatcactttgcgtgaagaagtcagtcccacttgcaggaaaaccgtaaacggcagctggatgctcagtatcatctgtgaaatcagcagtcctttgaacgggtctccgataaagaaaatcagcagcagtgcaatacccaatgacagaatcacacccacctgcgagtgactgtctttgatatgataggattctccgaaaataccggcaaagatagaacctgccgccataccactggttatcgtggaagatatacccgccatcagtaatgccaatgcaaaaaccacggcagcactgttccccagcaacggctccagcaaggatttggcctgctgcaactcttccacctgaataccgcttttaaagaaagttgccgcagccagcagtatcatggcactgttgatggcccatcccacaatcatagagaacagcgtgtcgaacaattcatatttcaacaccttacggatggatgcatcatctttcttattatattcatggctctgtatcacttccgagtgcagaaacagattatgcggcatcaccaccgcaccgagtacactcatgataatcagcatgctcccatgcgggaacgaaggtgtcacccacccttgtgcggccagcggccaatctatcttcaccagaaacagctcatagataaaggagagcccgatgaccgaaacaaaagcaatgatggaacgttctatcttcttgtaggaattagtgaaaagcatgacgactacaaatacggtagtcaagatagagccccatatgatgggaatgtcaaacagcatctgcaaagcgatggcacctcccaatatctctgccagcgaagtcgagatggaagccagcactgctgtacccaatatgggacgcgacacccaggaaggagtatatttggtagcggcttcggacaagcacaagccggttacaatgccaagatgcgccacattatgctgcaatacaatcagcatgatagtggataaagtcacgacccacagcaatgaatagccaaattcagaccctgccgcaaaattagatgcccagttccccgggtcaataaagcccacagtcaccagcagtccgggacctatatatttaaaaacgtccagaccgcccagatagcgtttgtggtctctccgtttcaagtctttaaaaatattcttcattgtgtctgttcaattaagagcgtaaaaatactcaaataataacaaatacctccatgttaggttcaaaaaaagcccctggcatctttcaatgtcaagggctctcatccattctttcaggcagtaggctcaataccccatctcgtgcaatgccttgcacaattggtcggggcaggaagtggaacgtcttccgcagcgaattccttccaaacgggcaatcaccgcatctaccggcatgcctttcaccaaacgtgaaagtccttgcaggtttccattacatccaccccaaaatgccacttctttcacaataccatcttccacattcagttcaatgttactgctacacgtaccttgcgtcttgtatgtatatgtcattattctccgccttcttccggtttcatgttagtataaaccgtctgtacatcatcaaactcttcgagacgctctatcatcttgtcgatggtttcgcgttgctcgggagtcacatccttcatatcgttcgggatataggtaaactcaccgccgacatcttcaaaaccgcactcttccaaatgtttctggatagctgcatagcttttcggatcaccataaatagtgatagtaccttcttcttcatcctcttcgtagtcttcctctacgtcatagtctatcaagtcaagaatgagttcctccatatcgataccgtctttcttcttgaaagtgaacacacacttgtggtcaaacaagaaagccagtgaacccattgttcccaagttaccgccgaacttattgaatacggaacgcacatcggctactgtacgggtagtgttatcggtcagtgtatccacaaaaacagctacaccgtgaggaccgtatccttcataagtcatacccttatagtcgctctggtccttacccatcgcatttttgatagcacgttcaatattatccttcggcatgttttcacgcttacaagtagcgataaccgaacgcagtgtcgggttgttttccggctccggaccaccggccttcaccgcaatagcaatttgtttacccagtcttgtaaaggtctttgccatgtgaccccatcttttcaatttggcagcttttctatattcaaacgctcttcccattggaactgtattttaaattatgaattataaattctgaataatgaatcaacgcagtttggcattcaacttgtcctccaggttcttcactagtttggacataatcttgtcaatctgcttatcgttcaacgtggcattctcatcctgcagcaggaagctcaccgcgtaactcttcttaccgacttccagattcttaccctcgtaaacgtcgaagagagaaacctccttcagcagctttttctccgtctcgtaggcaatcttctcgatttccgcaaactgcactttcttgtcgagcagtaacgccaagtcgcgtttcacggcagggaacttggagatttccgtatagctcaccttcacattgcggatagccttcagcaattctttccagttgaaatcggcatagtaaacctcgttgtcaatatcgaatgccttcagcagcttctttgttacaataccgaaagtagccaaccgctttccaccccttgtctgtacggataaaccggcagcatagatgtcatcagtcagattgccgacaaccaaatcatgcatgtgcagccccaatctggcaaagacattctcaacgtatgccttcagctcatataccgagctgttctcatccggatgagcccatgagttggtcaccctcttgccagtcacccacaaaccaagatgatagtcttcggaataagcggcaagcaccttttccggattcttcttctcctcgttgaagtgataacaattaccgaattcaaagaatttcaggtctgcattcttacggttggcgttgtgcgagatgctttccaatccaccgaaaagcagtgtctgacgcatggcattcaagtctgcactcaacggattcagcaacattaccagattctttgacggataagactccaagttgtcatagtaagcggcacgcgtcaacgagttgttcagaatctcattgaaaccacagcccaccagctgctcggcaaccaggttctgcagtttgttggatttatcatattcacccttggtagtcaggcaagacttcaaggtagtcggaatctccacattattatatccgtagatgcgcagaatatcctctattacatcgcaatcgcgctgcacgtccacacggtaaggaggaacatccagtgtaagcccttcggctgtctcgtctacaatcttcatttccagacttgtcacgatgctcttgatggtatccaccggaataactttaccaatcagtgagttcactttctcataggcaagttccacacggaaatccttggcaggagcggcgcacacatcttttatttcagaagaaatggtacctccggcaagttcctttaccatcaaagcagccagcttcaggcagtaaatagtggcattcgggtcaatacctctttcaaaacggaaagaagcatctgtgttcaacgcatggcgacgggctgtcttgcgcacccatgtgggatggaagtaagcactttcaaggaacacatccttggtggtttccgtagaaccggaatccagaccgccgaacacaccggcaatacacatcgcctcttccttgttgcaaatcatcaggtcgcgttcgttcaatttacgctccacgccatcaagagttacaaacggagtaccttccggcatggtctttacaatcacctcaccgcctttaatcttatctgcatcgaagcagtgcagcggctggccgaaagcatggacgatatagttggtaatatccaccacattattgataggacgcaggccgataatacgcaacttgttctgcaaccattcggggctttctttcactgtaacccctttcaccgtaacgccggcatatcggggacatgcctcgctgttctctacagttactttaatatccaagtcgtgattttctaccgcaaaagcgtctaccgaaggtttcttcaaggtagcctgcttaccgttctgtatcaagtaggcgtacaagtcgcgtgccaccccataatgtgagcaagcatcggcacggttgggagtgatgtccacttccagcacgtaatcgctcttgatgttatagtagtccttggcaagcgtacccggaacagctgtttccggcagtacgatgatgcctgcgtggtccgtaccgataccgatttcatcttcagcacaaatcatgccgacagattccacgccacgaagttttgatttcttgatggtaaagcattcgtcaccgtcatacagttttgtacccaacgtggctactaccactttctgtccggcagctacattcggagcgccgcatacaatctgcacgggttcaccttgtcccaggttcaccgtagtgacgtgcatatggtctgagttaggatgagcttcgcatgtcagcacttcgccgatgaccagtccttccagtccgcctttaatagtttgcacctcttccacacttcccgtttccagtccgatggaggtcagtgccgcagcaacttcatccggtgtcaaatcgaaatcgacatactctttcaaccaattataagagatattcatatcattatatttttattgtttccaaaagtgacctgcaaaggtaataagattttttggttggcagggaattataaatgaagaaaataacaaaaaggcgatgaagtgctttcccttcaccgcctttctcctaatattctatataaatctacaatttatacattcattgcattggcgcctaaagctcccaatatggcggaagcaacagctatcactaccttcaaaattttgtcccaaacgttctttttcatagttttaatctttcaaaattagtaaatacatcttatcctaacgggttctctccctggtcaccgtcggaaccgccaccggaattaccaccatcaccggcatcatccttaccgtccgtaaccactcccgtccatttctcaaactccaccccttggagcagggcacgcgtagtgccgatggcagccgggcgcgtgtattccggagtaaactggcaacgtaaagcagtcacctgattgggattcacgtcttcagatttgaccactcccttacctcgcgtacgggccttcatggtgaatgtgcccaagccatccagacgcaccgtacggctgttcagcaactggctcctcattaccgtcatcaggttacggattacattatgtacgtcacccggagtcagggaagacttctcggcaatcacctcagccaattgttgtgcatccacggctcttcccactttcttcaaactcagatgccaaagtttggcaccctcttttgtcgccagagacgactgtcttgcataataaaataaaggcatactttctttctcctttttacatttttaattcaacatggtttttaatctcgttttgttgatcaacaatgcaaaggtgaggatatatttgcctgcaaacaaagaaaacagcctcgctgaagctgttttctgagataagtttataaagtattgatttacaagtcgacagattaggcaagccaacttaatcaagatatcctacgatgatgattgcctgtactgccatataggtcaaagatactatgacatggggaatcttcagctcattcgccataatctgataagatgtttgcgatgcggtagtccgatattctcatgaagcatcaggcggtgaatatttggcacgcttgcagaaattgaagaagcagaagactagaacggaacagacaacggtatagatgaaatccgcattgacaaacgtattggcaaccgacagcgttgtcaaggtcgtagttaaaaaagctgtattttcatctattattttactatggcctcttttatacactccacgatataatatacatcttcatcagtcacccacggcccggcaggaaggcacataccgattttaaaaatagcttcggataccccattgatataagccggagcatccttatagaccggctgcttgtgcatcggtttccaaaccgggcgtgcctctatttttttgccaagcataaaagcacgcaaagcctccacattctcgttgggctggcaatctgttgtagcacaatctacggcatgaatcacacctgcagcaccacctacggcagtcctgacaacatccttataagcattttcctgccctttgatgcgaagtgaagaatccagagtgattgtacaaagccagaaattagagtcataatcagccgaaggagcttcatgcagcaataccccctccacatccttaagcagttccttatagagagcctgcacatgtcggtgatgtgcaatatgcttatcggcaacggtcatttgaccacgaccaatacctgcacatatattactcatgcgatagttataccctatcgcctcatgctggtaataaggataagcctcacgagcctgcgtggcataccacatgatttgattcttgctttcggcatctttacaaatcaacgcaccaccgccactggtagtaatcatcttgttaccgttaaagctcagcaccccgaacttgccgaacgtccccagtacctgtcccttaaaacgggagccaaaaccttcggcagcatcttccaccactggaatagcatacctatcggctatctccatgatacgtgtacagtcatagggcatgccgtacaatgccacaggaacaatagcttttggcttttttccagtcttggcaatgcggtccttgatggcttcttccaacagttccggagacatgttccaagtttctttctcagaatccacaaataccggaacagcccccagataagtgaccggatgcgaagacgcacagaatgtgaagctttgtacaatcacttcgtcaccctgtcccactccgcaagccaacagagccaaatgtactgccgccgtaccggccgaaagtgccaccacttccttgccttcgcctacaaaacgtttcaaatcctcttcaaaagcattcacattaggaccgagaggaaccacccagttcgtatcgaaggcttcttttacatatttctgttcaataccctcctcgctcatatgggcaaggcaaagataaatagttttatccataaatatatatgtgattatttaatgatcaaacttcggattcctcacatagtggggaataaaaagaaaggaaacggctttataaatcctttccagatatcggaataatttactcataaatgtttccatgaccgggatacagactgcaatcctttgttaattccatgatacgttctttcgagatccgtgcatcttccctatcgctattagggaatgaggcaatgactttaacacccgggatatatgaatcacccgagaaaacattgttctcgactttataggtaaggcaacttttatcatgtccgggagtttcaaacacttccacgaaaattcccggaaatatttccactttatcattctcatgtaaaaccgtcacattatctcccatccatattacaggatcattgtgataacgggaaaaattaagtttatccgaacctaaagcctccttaccgaaagaggaagtgtaaactatgcaatcaggatacaatcgtaataaatcttttataccataaatatggtcgtaatgagtatgagtcagaaacaaggcttgtaccgttccgcacttttcctgaacacactgctttataggagcaatatccccaatatctatcaatacatgccaatctttcccctcaacagacagtatataagcattggaggtgaaaacagaattgacaatctgatggatgttcatttcagttatgaccgttgaaagcctcagtggtagcattaccttccttattgatcccttctctaacgaacactttctttatggttagcataataatcttcacgtccagccagaaagaaatatgatccacgtaccacacatccagttcaaacttacgtttccaactgatatcattccgtccgtttacctgtgcccaccccgtaattcctggacgtacttcatggcgacggaactgttcctctgaatataaaggaagatacttcggcaataaaggacgggggccaaccaatgccatatccccctttaatacattaattaattgtggcaattcatctatggaaagagaacggactattttaccaatctttgtcaggcgttcagcatccggcaacaagtatcctccagaatcccgctcatctgtcattgtcttaaactttatggctttgaatatccgggcattttttccagggcgatcctgggtgaaaaagacaccggcacccttattggtgaaatggaggaaaattatcagaagaagtaatatgggccagataactgccaaaacaaagaaagcaacaataaaatcaatcgtacgttttaaaaagcaagaatatagcataacattcgttaatcaattcattaatatttttccattttgaacatttacattctctttcaatatctttgcaggatttcctgctgcaatacaattcgaatgaatattttttgtaaccacgctacccccccctataaccacttgattaccaacagataagcctggcataattattgatcgaactcctatcacacaatttttaccaatatatgtatcagctttcaaacttctacaatgatcatgtgccaatatcatagcaccagaaagcacccaagtattatccccaatatggatacctttagggttaactgacttatctaaatgagctttccatgaaattctgcaatttttacctatatccattccgtatctccaacggagataacgaggatataaatcaactaaaatcccccatactttactcctaatattcataatcataatatttttaacgatttaactacgggattctctaacagaaagaccatgtccctccagtctatccggtaggcgaactcgttaccttcgccatctttaattatccgcataaactgatagctcgcaacaaactttttctcgaaaagactataggaacggttatcataagcgaacaagcaaaccgtacgatgacggtctttagatatgacgatataaatatcccatcggaatgctcacggtgcaactgttcacgaatgacgaacagagcactcgaatgcttacaacatgtcagtaaagccacacaggtaatagaagcggttgacgccagtcacactcaacatagcacctccagtttttgaatcagacggtacaccccgagggagcaccatccacctgaacttccactattttgctgctggtacccttgtaccatttatgaaaaaggttttaagggacgttattctttaaacaaaatgactgaagagacacgctgtgagtgacggtctctgtttggtactgaaaataaaatctctcaagatctttgctgctataaataattgttagaagttgattgccaacaaagatagaaatagcatttttaggccctaatttgagtgcttacggtagacctttactcaatagccattttttggctgcttacacaaaataaactagaataaattatcgctatctttctttgattataataatgtaaatccaccgtcaattactagattggaaccagtagtaaaagtactggcatcagacaataagtatatagcataataagcaatttcttctggacgagcatatcttttcaacggatacaagttcttgtttgcattcacctgctcttctgatatattttttctactaattaaaggagtgtctaccctccctggcaaaatacaatttacacgtatattttgattagcgagttctacggcttgagacttagctataccaactaatgcaccttttgatgccgaataaatagaattcccaatatgcccagttaatactccatcaatagaggataaatagacaatagaccccctagtccgcattttcttattcttcaatatcttttgtgttagcaatactggtgcttcaaagttaatttccattattctttttagcttactagctgtagtaaacttaaaaggaagagttagtccaacacctgctgaatgcactagaccatcgattgtcgggcatgtctccaagaaaagtgacgtttcctcctcactaattaaatcacagcaataataagtatgcccgtttccttccaataaggaaaaagtatccttcaagcgacactcatttcggccaataagaataagttttgcacccattcttgaacattcaatcgcaatactttttcctattccagatgacgcccctgttacaagaatcgttttatttattaaattaaatggattgtacatttcaatattgtataaattccaatgttttcagtctatccatagataataaaacactcccccaagacaatccaacaccaaatgcagtagcaatcactttcttctttttaatcaaaagatctgaacattgagtagctaatgtcaaaggaattgtagcacaactcgtatttccaaaatttcgcaagcaatatggtactttctccacaggaatattcagcttcttacgtattttctcattcataaaaaaattagcttggtgaaaaataaatagatctatattatctttttcaacctgactatactccaataatctcaaaactgattcaggagctcgctttaatccaaatgcaaaaacagccattccatccattacgctatctaatggccttctaaccacacctttcccatagtaaacatcctttaaagactcttcattaacaggattcctggctccaccatcttttattattatagcctgatgagagttaccatcggttgaaaaagtaaaaaacatattatcagcactagaattatattcaatagctgttgccgttcctgcatcaccaaataaaggccaagctgttttatcatttcttgatttaaattttgaaggtgtatcaccaacaagtaacaatccctttttcatacagccagaagacatcagagaagcaattacgcttaacccataaacccatccaggacaaccataagaaatatcaatagtataacaagtctgtgacagtcccaaacgtccttgtaaaatacaagaagtagggggcagaatgtaatcaggagtttgacttacaaaaatcaagcaatcaatttcatctttattccactctaatccagcaatcaatttctcagcagctttaaaacacaaatctccagcagtagtacttttatcagcaatatgtcttctttcaataccagtagacgcaatcactttttctgcctccccatcttcaaagaaagacagagatatattctcttctacatcaggaggtacacaagctactataccagcaatttctataccacctatacttaagttagccatacatattattttattggtaattctgcatataaaacttttcctgtttcagaacgaggaatgtttttgagatatcgagtctcaaaaacaattctattcaattttagtgtgactacaagaaaatttattatattatctttttgttctaagtcggtagtataaataatcatcttatcatcagtaccaacacaagcaacatcaatattaaattgctttttcaataaatcttctgtataatccaagcttattctatttccaaataattttaaaaaacgctttttacgtcctgcaatataataaaatccatcattatccttatatactaagtcaccagtgtaaagagttcctttattatcatctccacgcaaaaggtcattaaagcattcagcataacccaaagacacatttttccctttataaacaagctcacctataatattcgattcttccacaattaccatatcagtccaaatctcaaatttgcctccaggtattgcctgcccaatgctacctattttttcaatagtatattggcatggcaaataactcattctagcagtagcttcagtctgaccatacattacataaaaattaacatcacgtaacttagcattctttgcgaaatactctatcagttcattgctgagctttccacccgcttgcgtcaaagttcttaaagtaggtaggtttctattccaaaatttcattttctttaagatctcataagtaaatggaacaccagaaaaagatgtaactctttgttctcttgcaaaaacccagaaatcacgttgtatataagagtcctcagttaacaaaattgtagcaccagatattaaatggctattaataacagaaagtccataagaataatgcattggaagtgatgttatagctctttcgttttggtcaatatccaagtattgtgcaattgatttcgcattttcaagaatattctctttggaaaggcgaaccaatttaggtgagcctgtactacctgaggttgttaataacaaagctagattatcaggaagatcaacatcttttttcccaaatctcatcaatgaatatccatgtgatgagaatataaattctttatcacaatactcatgtgccatttcatctggcaaccataaatatgtcggtgaatatttacgaataaactcacttaacaatgatttatctatctccttactgagtaaaagaggaactgcattaactttaaaagatgagagatagccgagaactgaaccaattgtattactacataatataaaaataagagaatgcggttgaatatatttacctaactcttcagacagaatagacacatttttatacgtatacaattcacctttgctagtaataaatgcagtattagaaaagtatgaggaaaaatcgaacataagtttaaaactctatattatattgattgtgcaaaactagaagtccatcactgtacgaagttatttcaaacatatcttctggttccatatttatatcaaaagtctcttctaaagaagatattaaattgatgtgtccaacagaatcccaattggctgattctttcagcttcatattttccaaatcatcttctctgacttcaaagatattacaaaacacctcattgtattttttcaaattatcagtcatatagcaattagttatttatgcgaatcagcagttgaaatcactgcttgattcagtttgttaaaatgttattattcaaataattatttcgtttatccatttctcaatctcattgggaatcagcatattataagaataaaaccactcattattctaattatgattcccaaggagaaagagctaaaacttataagaatatatatgtatatctgcgatgtttaccagttttcactgaagttcaactgccagagattcagtaacaatgcaaatcctgtcttcaccgatgaggaactgtttactgtatatctgttctgtggaacatatcagcactgcttcaacatcaaagagatacatacattcactaaagaatatttgctttcttggtttcccaatcttccttcttatcagacattcaactatcggttgaaccggatgagtggagcgattaacgaactcgtaaagcatctcattacattctttaaaccagccgattgcgattctacgacatcacttattgactctatgcccattattacctgtgcaggaaagaacaaaaaacggaaaagtggctactgaaataacaaccaaaggttattgctcaaccaagaacatgtattattacggcatcaaacttcataccttaactttacgtagaaaagggaccataccattccctgaaatgataatattatcatcggcaaaggaaaatgacttgacggttcttaaaagaaaggtggccgataatcttattcacagggatatatttgcggacaagatatactcagatttctctttctggggaaacaagcagcaggaacaagaggttactatgctaacaccagtaaaagcaataaagggagaagaaaccattattactcaaagagagaaagcaggaagagagacctattctctacagctgtttcaaaggtcagacagcccatagaatcgtttttcaactggctgaatgagaaaacaaatattcaaagagcgatgaaggtcagagccacatctgggcttctggtacatacgatgggaaaaattgccatcgcattcatttatctaatttttttaaacaagaatcagagttcaactactgattcgcattatttactatttttacaaataattcctctatagttgatgatttagccaaatcattacttttcaatgaaatattgtactcttcatcaatcatagcaataattgataatgctgttaaagaagtccattcgcctaattccttaaagcgtgtatgaggattaaatacagttttttcggtttcttcaaactgttccgcaaatttctcaataaaatcatttaattccataatctaattatttttttagtttatcactcaaaatcaaatttcttagcaggatttccaatgtatactgcattatctttcgcattcttcattagcacactgtttgctccaatagtagtaccggcacctatatttatattgggaagaacgacagcagatacaccgaaataattcaatgttccaatcttagttccaccactaattcgagaggcagtcataaaagagttgtaatttccaactaaaacatcgtgaccaagagatactctattgttaaatatattaaaatctcctatatgaacattacaactcatagaagaaaaactaccaagtatattaccctttcccattgaaaaattatctatatccaagatatgtgcttctggcgctacaatattaggaaaatcaataagtggattagtaatagcctcataaacagcttttaagatcttaggctttccaatagctaaaataacagataaaggttttggataagtatttagcatttctaaatttcctaatatctctccatattcatttctatatccaataggtttattaacaacatcatcatcaaaaaaaccaataaaattccaacattgttgttgtttatttatgcgtttcaacaaggaagccatttcacggccatatcctcctgctccaaatattgcaatatctcttaccataaaataaaaaataacgatattaacattataatttcagactaacatccacaattatcttttcgatatagtacattgtcaaaaatagctaataactgatttccaataactgaggaagaataacgctccttactattcttacgaatatcactagcattatatttcaaaatattattgaacatataaagcagcgattccgacatagagctcgtatcatctacaggaactaatattccattactattatttatagactcttttgttccaccacagtctgttgctacaacagggattcctattgataaagcttcaattattgcaacagaaaaattttcaccccttgatggtaaaataaaagcatggcttttagccaaaatagaaacaatatcatttttactttttttccctaataagaaaatatgattttccaatcctaaatgtgtaatttgcttataaagattatctctttcaggcccatcaccaacaatcaataatttccatgttttttcagggaattgagtttgagaaaaactatttatcaaaaaatcatacccttttcctttaattaatgtaccaacagaaacaaattgaaagaaatcatttttctcaattaaaggacaagtaaaaaaatcatcactaaccatattgtgaacaacaaaactttctttattaaaatgctctcttattctttttcttaaagaatcacagacagcgattatagcatctgccgtactataggctttagctcccattaactttacatattgtggcagaacatctttatttaccccactccaatgctctatacagacaagtggcaatttgtgctttattttaataaaagaagcaaaataagtattatataaataatgagaatatattaaatcaatcttatcattctctttaataatacgttcgaccaatatctgaaaaaatattttcgtaaaaaatgatgtaacaaaaaacaaatattgcagaggaaggggaaatatatagatactataaacaataatcccattatcatcaatctttgatattccccattttctatttttacaaaagactcttctgtcaacatatgcaataataacattgttaccagagttttttaatgcaatcgcttgctctttttcaaagctcccccattgtggatcccatttagatggatatcccctcgatatcataagtatattcatataatatataagtatagtaatcaaaaacaagttgtcatccttttacagcacagatgtatttactccattcatgagcaaattagcatcaataaatagatttctatcaacatagtattttttgatataattcaataattctatctaatgcaaaataggcatcataagcttttttcgtattggaagaatcattgtcatgtgagatttctatattttccaaattatcatagtctacaataacaccacaattaaatttctttatcaattcaacataatgaggcattgcattagtcgtaataggcttgacaccacatgccaaatattcagcaaattttataggagaagcaacataattaacaagattacattctcttattataaaaccatattcaaattgtgataatatattgggtatttcaactctattcaaaatagaatacactgatatattatctctatcagaaaaaacatcattaatctttctattggccttttcaatatcaaaagttataacatgtaaaactgagtttttttcatatttcaatatttgcttgaaaattaaaagagttttatcaaattgctgccaaacagacaatccaccgatatacacatatgaattaggcttctttattacattaaagtttcgtgaaaattcagacaaacaaggaacaattattgatcttttttcatttattttttttagacaatattttttctgtaaaaaatctagcatagaatatgatactaaaatataattagaagaaaacaataatgctaaatattccaatatattaaaaatataaaaccgatatttcttatgaaacttcatataatcttcttctggcagtatgccctgtacccaaaaatatattttcttacaagaaagtagacaaggaataaacatctttataactactataaaatctgggcaccatacgtacttaacatctttcgctgttaaaatatgcataaaaagagagaataaatttgaatattcccaaatttcaaagcctttaagttcattagtatcaatgcttgcactacctttttttataattaacactggtacacctccagctttagatatgtaattaatatgcaactttatagcagaccaaacttgaatactataaaaattacaaataataaaaattttatttcccataattttcttcaaatgatttcattggttcgtatggactatgtgaatcgttatattgatctcgatattcataacttggatgaccgacaaaaagagagtaatataaatagtttgaatatggaacataacgagaatctctagatagatatctacttataataaaaatagaaaataaaactacacatgttgtataaatcaatttacttcgcttatttaaaaaaacaataaaaaccgataacccgacacaataaaaaactgagatatacaacataaatctatttcccatcaaaaatgtcagtcctatccgatacaataaaaaattaataaacgcaaaattaaaaacaagtcttccattccatatttttgtttcaatatatgatttagaatacagaaataaaaccaaaaaaaagatatgatatatataacctaatgaaactaaattactagttgttcctgaatagttaagcagttttctatatattattggatgccaagaaaataaagatgaaaacaatgataaaatcacattttgatctaaaaatataacagaagttagcacatataagaaaatacattttttcatggataaattccacgtataaatccaatataaaggaaccatgaatattgctgttgtatggatagaaaaagccaatacagccatacaaaaatataggaaagtttttcttttttccagtaatggtattgacaacaaaaacagcattgccgcaatactattacgaaaaggtgcatctatataaagataataggcaaaccacgtaaaatagaatatcaatccgatataacggaatttctctcctgcatatttatttattaaatgtatagaaacaatacataatacacatttaaaaaaaattgcaaattcccaaaacccaatacctaatattttggataaatacatcagcaggacatagcccggctccattcttaataaatacaatatcaaattagtggaatcaatcccttcataatacatttcataattccgccaatcagatccacacatataaccaaagcaaaggaagaacacaatataaagaacacaaaaacaataatatgcattggatcttttgaaggagatctgacctatatataacaatataggaggaatgaagtaaagaaacatctatacagtatttatcaactatcgtgatgacattttaaacgtaaacactcaatttaaggcatccccctttgaaagggcacttttcagtgccctaaaccgagttttgttaattaatttgtcttgaatttaacattggctggcagccaaagtgattttgtcaggaaccatgttaacataatccctgcacccgttaaagatatttttaaaaaaagttccgatgaagttccagatagaactgccatgaagctttaccgttacaatcacactatgatatgttgcagccatctcagcaccggcatcactaccataatgaagtgaattattacgttgagtagtcagctttcgaatagttcgctctgccagattgtggtctataggtaattcaccatcatccaagtaagcaaatatctctttccagaaccggttcagataattgagagcttctctataatactggcttctagattctgaatcctttgactgttcactatctaacaaactgcgcaactctatcaggagttccttcgtttccaagctttgcctttcccgcaacctttctttggaagtgaatccggcatcatcgtatttacgctccctcataaagaactcctttaaaatttcggaaaagcgctcggatgtcggttcaccactctgattggaagccttgacaaacttgtttttagcatgagacatacaaacttggtgtacagtatctttaaaccaggctgatttcagctcattgccgataaatacataagcattgtatccgtcggacatgatactcttcaattctgcatcgcccaaaaagtctgtaagtacctcacgaccacgcgagccattctcatagaagaaaatggctgttttctgagccttgttgaccagaacccaaatgtagcatttcttatagtgatcatatttacgcactttacaccaggtctcatcgcagttcacaatcgagtccttttccaaagctatggacttcaatacacagaccagttcatccaggtatttcttgcctttcgtaagccagttgcgcaatgtgtttttagaaacggtcatccccatatctgtcagccattggtgaagaagaccaaaagtcacattcttcacataaacttcgtaggcaatagcctgcagaaattcaggagtggccctagtgccttcaaaattggttactacctccggatgaccttcagaagggaaatagccccacttcggctttttaccaggctctgcataatgaaccgtctcaaaacattcttccgtaaggaaagtacggaaactgaacacccgtaccattcttctttcaatgatgcgaccgggaacctttgtcaagtcagaaggatgctctatcgcttctccggttactcccatcattttatacccgtcaggatgattggacaaatcacggcctttcccggaaggctctttaacctccggggattgaacatgaccaaccgaatccgtgcgaagcgtatcatcggttccatcataatcatccttctccttgttacggtctgaatcaaccgttttagctttagactttatcctttgacgtctatcaccaaaacgttcctgattggcataatcaagtttgtcttgaagtgacttaatcttacgttcagccgatttgcgaagcttatgctcttccgataactgattctcaaggtaagcatgtttcgattgcatggaagccacctgatccttcagttccttcatctcagccataaaatcttccaaaacaagcttcatggcatcacctgtcaacctgaggtcctgattctgcccggcaaggtattgtatgtaccgctctttctgatcctctgccatacctgcactataatttataggggtgcgtgagcaggtttccctactcaacaactctcgttttgttgtaattatatcctgcagttcgagcatacttagacctttgatttacagtattaaaggtagtaaaataatcgcaaaaccacaactgtacaactgatttaattatctgatttttaacattttaaccacagatcctcaagaatcaaaaccacgtctttccagtcaatccgataaacagtatctgccccgtttcgctccactttcatgaactgatagcctgctacaaacttcttttcgaacagactatatgaacgattgtcaaatgaaaacatacagactattctgcgatttcgcgacatgactataaagacgtctccatcattgggttccctgtgaagccgttcacgaatgacagacaacacacggctgtgcttacaacgcatatcggcaaagtcacggacataataaaaatgattgagaccggtaacactcaacatactccctccagattctctaccatacgaaccaaatcctggtagcttaaattctttcgggacaaatgtaagccattgctaatacgaatggcaacccaaatacaaactgggtgatcatttctgctttgtgataccgattgaggctgatcactagtcctggatttttcctcatgaccaatttcaggagcaccatcaatctggacttcaactacttttttccgggtatccttgaaccatttctgaaagatgttataaggaactttgttcctaacacaaaatgattggaggggttctccatgaggcaaggcctcggtctggtattgaaagtaaaaaactttcaagatcttcactgctatacataattcttaaaatttggttggcagcgaagatagaactttcaatcaatagccattttttgactgcttacattttaaacccaattatacactaaattttgatttaaaaaaggatgtaatatgctggctagccaatccatcaccataaggattcactgctttactaattgtttcataatatacacaatcttctaacaaattagacacttcaccaacaattttattataattcgttcctactaattttaccgtcccagcttccaatgcttcaggacgctctgttgtatcacgcattacgagaacaggtttacttaatccaggagcctcttcttgaataccaccactatcggtcagtacaagagttgacttttccatcaaatacacaaatgataagtactctaatggttctatgaaaaacatattttctatattaaatatatccttaccaaacacatcataaataggcttacgcacattggggtttagatgcattggatatacaaaatctacatcagcatatttcttcgttaaatcttttatagcagtacatacagaaataaaaccatcaccgaagttttcacgacgatgccctgttatcagtactagctttttaccgtccttcaaacgatttacatcatatcctgcaactttcaaaacattctttaactcagcatccaatgatttatcaatcttaattttatctaccatcatgtagagtgcatcaattactgtattaccggtaaccataattgctttatcattcacgccttcgtccaataaattctgacgactaagtggagtgggtgaaaaatggtacgtagcaatgcgtccggttatcaatcggttcatttcttccggccatggactataaatattgtgcgtacgtaatcctgcctcaacatgccccacaggaatttgctgatagaaagcagctaaagcagaagcagtagaagtcgttgtatcaccatgtaccaatacaatatcaggctgtgcctctttcaacacatctctcatacctataagcacacgagttgtaacatcatagaggtcttgtccctgcttcataatattaagatcataatccggatgaatgttgaaaattgtcagcacttgatcaagcatttcacgatgctgcccagttacacaaacaattgttttaaaatcatcgggatatttctgcagttctttaaccaatggagccatttttattgcttcaggacgagtaccaaagacaagcattatttttttcattagggtatatttaattaaacattcacaaataatgacttaaaatcaaactcttttattgagtcaatacgagactctaaattccattctcttattatattcgctattttgtggtaatcttcaaattcgatgagagagaatactccatggcttgtaccataaacatattctgccattccctttgctttctcactatatgacaaaaatattgtaggaacattcattgttatggcattgattgcacagtgcattctcgctgctattacaaaattgcatctggccaaatcactttttaagccaataaatccaggatcagaactcaccatagttacagagtgccctgcattcttcactctacttgctatttgttccaaataacataaatcattatcattcagagatgtagaaagtacgtgaggaataaacaggagtttacagtgaagttcttcaaccaatccacaaatagcttctgcttgttttttgacagcagtttctaaactatcataatggtataaggctgaaagtggactaagattaatacctaccgttatactttcagactttccctcactactcaaagaagggcattttacaaaataagcaggatcaggagcaaagactacattctgtttaattcctaatgaattaagataattcaccgttactatttctcttgccactatcagatcaacactctttaagtgtttcttaaagaaattcaacgctttcaaattctgttcaaattttccaaccgaagccccccacaatacatacttaataccttttgcctgacacttttcaagaaacaaaggtaacgaaatattacagcctccaatagaagtcaacgtatacaaatcgcctccaatagaaaatactgtatcatattcattcaaccaatcagtagaatcataaggcatagtaaaagagatgccaacaaatgtaagcaatttacgtataatgtttttaggattccaccgtcctaatcttttacgttgcagtattttcagatcacaatcagctaatctctgcacatcatcctcataattatacgaagcatagctaattttgatagcaggatcaacgttcctaagtatttcaatcgtcccacgtactatagcttcacaaccataattataaacaccgccaatccctatcaataacacattcttcattttcattctaatatatttcaagtaaatagcacataaagtaaaatttatactactattttactttttactcctaattttcttcaaaatcaaagaaaacagtttacttttcatttctttatttatcccaattatccaaacacttaatatcacacaaaaaaggctcactaaaataagagtcaaattataatatatttcattcaaccccaatttattaccaaaaacataaatcactaatggtaaaggaatagctaaaatagtaaccttaaagcaaggcataaacactttcataatatctcgccatgtataaccaacaatctttattataagaatgggttttacaacaagccccaatagaacatagcacgctaataatgcccaagctaaaacgacaggagtatatccactcttaaataacagataaactatcggaaaaaccagaaaaccaattaatggtgaaattaatgcattttcctttattcgccccttggcgtaaagagctgtataaaatgatgtatcaaatacttgaaaaagactggtcacaagagtcaactgtaaaaagataactgtatagtcaggaacgattcccaaccataacctcaataaaggttctgttaccaaacaaatgggcagacataaggcaagcatcataaaatatgaatactttgtcgaactgcacaacaaatctttacttccttgataatcttctgctgcatatctttttactatttgtggattaacagctatacggaagttttgaacaaattggttagcagccatattcacttgattagcaatggcacgagctgttacaatcgctggtgaaaagaaaacattaatcaaaatagttgcaccttgattattcaaagcaatggaagcgctcgaccataaattccaccctgaatagtttaacacatcttttattatagctctgtctattgagcatttagatcgtgtttctacaaaattacgagtacaataattacgataaaaccaagttataccaatttgcaaagtacacaagaatatagcatataatttcaatttatcccaatcacttattgccaataaatagacgatgagaagtttcaatacagtttctataatactcaaataagcataaacattcatcttttcatgactgattatagaagcattaaaaggaacctgaaaaaacatagccaacactgttaatattgagaaatgatatgcaaatactgcagctcccattctttcagttggaatctgtaacttattataaacaaaccataatccaatagtttcagctagtaaaaatataaaaaatgcaagaattaagtgcattgccaatactgtcgaaaaggttcgcctaagtttatcttcatcctttttccctaattcataagtaagaaatcgagaggagccagaacttaatgcagtgcttatgaacgaaagtattacggcaacaccacctacagtctgataaataccatagtcattaactcctaacatttgtaatataacgcgtgatgtatataaagtgacaagcattgtaaacatcatacgaaaataaagaaagaaggtgtttttaacaatagttctgttatttgtttgccgctctatcattctatgatactacttattttccacataattttctttttatctgatttgcaatttcataaaaaaataacaaacttcgaatatcccaacgttttttatacaaagctaaataatacttttttttatccttccatgttgcagttttaaggtaatctataaaatgcaaattcattttttcaatgctaataccattctttttacaccactttttaataattcggtctgtatcaccttcaaacccccaatcaattccaaattgatagttgctctttacatatgcattataagttaattcaataccctcttttaagaaaattgtttgacgaaacgaaggaacgactttctttatcttatcattactatttagtgcatctatagaacgcccccccaatatttcaccagcatgattaggaagttcttgtgcataaaattcacttgtaacatccacaatctttactttttttccagataattccgacaaaacattaagtacttcattaaaggagggagtttcatcaccacaaatattaaaagcctcattataagcaccccgattaccaatcaagccaacaacaccaacagcaaaatcttctacacgtgtcatattgcatcgatttactccaccattccaacgtataatcggtttttcattcaatattcgagacaccaatgtccaatgataaccatacttaggtgaaataccataaggaattcgtgtatctccatatgttacacaaggacggataattgtataatttgtatctgatttctttgccaggatctctaaatgtttttcactagcccatttattcacactataactccatatcggtaatatcttaggagaatcctccctacaaacttctcccaaagtggtgttataaacagcacaagaagatataaaaaaatattgctttgtataatgagagtaaaaattgaaactatctgccacctcatcatcagagtagcataaataatccataacagcatcaaatctcctttctccaagcagatgccgaattttttttaaatcatttttatctgattttaaaaattctacattatctggaataaggttgctcctactacctctgttaatcatggtcactttaaagccttgccttaaagcttcattagttacagcactactaagaactccggtaccacctattattagtacattcataaatataaatacaagaaaaaaatcttgagctatatcaaagaaagagtattacttattattaaattaaaaactaagcattgtgcccgcccaactaagtcctactccaaagccagtcaccataacagtcatgccctgatgtattgttccattctccatgcagtgtttcaatccaattagtacagtagaagaaacagtattacctgtattctccaaattaatataaaacttctctttgggtaaaacacatactttccggatagtatttaacataaacttattagcttgatggaacacaaaatagtctacatcttctttcaaaaattgattcttttccaatacttgcttcatcatagtcggaactgcctctaaagtaaagttgaatatagctccaccattcatgtacaaataatcatcataccaaacatgatcttcatcatctttaatagacaatccggttcttcccggataccgagaagcacctgtctttactatcagattatttgctccattgccatcggttcctaatacaaattcaccaatttcagcaaatccatctgttgatactaaacaagcggctgctccatcaccaaaaatagaacgattacccttatcagaagggtgaagatatttattgtatgtttctgatgtgagaagcaaaacatttttggcaatgcctgatactataagtcccttcgcaatagctaatccatatacacaccctgaacaacccaaattataatcaaaggcaccaatatcagtacgcagccctaatcgatattgtaatacacaagctgtggacggcaaataataatcagaactttgcgtacaaagcaatagaaaatcaatatcctttgaatcaatagagtattcttcaaaaagtttctttgctgccttttcggccatatctcctgctgtctcaccaactgcagcaacatgacgaacattcacacctactttggctgccactttttcaacactccattcaggaaactcacttaccaagtcttcattcgtaacaacttgttcgggtaaatagtaactaatagcttttatatatgctcccattttattataaattattcgcacctcctgtcaaatcaatacaagatccagtcatccacgaagatgcatccgaaagtaaataaatagcaagatttgccacatcatcaggatacccatagcgctttaagggatactttaattgttcttgctctaaatcttctttagtcaaccctcctttataaatcaagtcagtccataccatagcgggacaaatgcaattgacacgtatgtcgcggggagccaattctaaagttaagcatttggcataagaaataatagctccttttgaagcactatacaatgcattgcctatactaggagcatcagccgcacgagaagcaataaaaacaatagacgcagccttattgactttctttgcagataataaagcggtttgcaacaagactggagctttaaaattagcatccatcacattctctatatcagctttatcaatcagtttgcatggtttacgatgtccaataccggcacaatgcacaatgccgtctaaattcgaaactaaagatatgatttttaaaatatctatttcattagttaaatctcctgctatcgataaatgcccttctcccatcaataacgaacgagttacgttcaatcgctcaacgttacgtccagtaatgataacagaagcgcccatcttagaacaagctatagcaatagcctgtccaatcccagctgacgcaccagtaaccaataattgtttaccctcaagcgaaaacggattgaaagtttgaaccattctacttagcttctactaaattaaacaattcctcaaccgtttcacatgaacgtatctctttacctgttatttctttattataggtcgtttttacaaaagcgataatagacattgctgttagcgaactccattcgtccaaatcctgatacacagtatccatttgaatttcagtgatatccgtatcttcaaattgttcagcaaatcctttgacaaattcttctaatatcatatccttaagtttataattaatacttccaataaacatcttcttctatcacttgtgccggattgccgctaaccattgaataggctgatacattttgagtaacaaaagattttgccccaattatagcaccatcaccaattttaactccgggcataatgattgcaccttcgcacaaccaagcgtgctgacctataaataccggacgcgtatccttatatccacgcatagcgatataatgatttccattattatcgcgaatggttatatcgcgccccaacataactctatcacacaagtgaatatgttcaccacagataatcgtagcatttatattagtagcaccgttaccttctatatgtagaaacgcatttttaaatacttctacatcagagccataacctaatgaaaaattattatctatttgtaatactgcattattctcaactaaaagacgagtttcaagccttgacttagagaatcttttctgtccaataacaaaaattcccttaactttcacatgcgctttaggatggatttccaaaatagtatttcgatgaataagtataaatgcacctcggactatactacatttcacttgcttacaaaaaagattatatctaatattcttccaataaagaggcaaattaaaacgagatacacttgctatattccataaaaagcgaagaacatttttcagtttccgtttccacgttagtatatcaattggtctacgaatatatttagctgctatatcctgaaatggcattgtatccaaatcttcataaaaactcactctatcaactaagggagcatctaatgattgcaccaatgcacgattacctcctaagatcgattcaaaaggtactttcttttcaataatagttgattttatcgtttcaaaataagattttcctttctgggaattcagcataaccaaactggttcccatatcattatccaattcttttcctacagtatgctcggctccccaataatctgccacagtaatatcagccatccgtggaaaacctttaaactgacaatcatagcacgaaggacgagagtatacctttgtacccaaatagcctattgtaaagaaactagtatcttttgtatcataaagaatttgtttgttctgaaacacgactttactagttagttgccgccatcctaattctttatttttcgccttaaaataaacaattttagattgatatctatcttccaggtaatccaagtatttacgaaaaactttaggagaattaacccctaaacaaataaaatctacaataacaagattatcatagtccttcacaaggaagcgacgtaatgctgccatttgacaaggagtaccacacaccaatactttttccccacttttcaaaagttgacggactagtttataaaagccttctgcattactttgcaggtatttagagctacgcagtgcagccaagtcttttttatcattagatataaagtgacttacagaatagtcttcattaaagatagcaccgcctacataacctccttctttataggttctttctgccaaagctgaaaataagccaccggaagtgctgtcaaaacgcacttcaatgtttttatgaatagcggcatggcattcagactgaggtaaatcattcttcttcagctcttctacatgaataacaggacaaacgttatcacatagtccacaattaatgcatcgctctttatcaaccactggataccaaaatccttcaatgtctatatggaaagagattgcatctttggggcatacatcaccacaagcattgcatccacaacatctagatttatctgttacttgaatcattattatttataaaattcagatatcattttttgatatttatctacctaaaagaaatatttatgctttcctcaaattacaaacaaaacttcttccaaagagtatccaacctacgcaacttcctcctataagtaatacaaaaccgagtaaaactatagatttactaggtttagcagctcttattggaatagtagcaggctcaactaccgtataaacaggagtaatttcctgcacttttgcttcagccatctgcaattgttgtgcaacacttgtatatacttgataagcaagattcatctcattttccaaacgtacctgttcagcacgataactctgaagaataatatttttgttagcatcagaaaactttgcataattctcctgtgctatctcatactctttcttcttacgcgcaaaaagcttcttctgaaattcaaaatcctgacgggctttgttcgtacggtattccgtaacgtaatcttgtaaacgatacattacactatcagtcaagcaagcagcaatacgggcatcctgcatcgtaacagacaaagtagtaagtccagtcttcttgtcgactaagacactgatacgtttactcaacactttaagaattttagattgttccttggttagatggaagaaatcaaatccaccttcattaacatcagcttcttttttgaacaaagaaactatccaatttaaaaatttgaaaggagcagaagttatcacactccaccacggagaacgttgatactcgtccaaataacaataaagtgtagtatctattttcccctctaggtctttcactggaatattgaaaagaccagtaataaagggagtagaactcacaatatcgggatacaaatcaggatagatagcatcagcaccagaagaagtatttatattaaatcctgccatggcagcaagagaagacaatcctcccccactctttccatccgacaactccggagcaattgtagctgtagctgtatattctttcggaatactgaaagcaatcaccagtcccacaatcactgcatagccgcaacacttcaatatccacttgcgctctgcccagaccttcaaggcaagctcaagcaaatcaatctcctcttcctgtggatgtttattctgttgtccgtcattcatatcagcatcctttctttttatatcttccacttatttattatttaaaagcattagtcaacgtagccaccatcgccgcaatcgtcgcagtcatggagctcatccccataatctcggaaagctggagacgcttcctctcagacttcgtgggaaccacaatctcacaacccggctggattaaatcactgtcactcttcttagcacgggctaccgtaccattcagataaatgatgtatgctttcttctttttcgcattttcgccataaccacctgccatattgatataatgtttcagcttggcatctttctcccaggttactgtattaggatacatcactgaaccgctgatcttcaccgtattgacgtattcaggaatataaacgatatctccctcacgcaggacaatgtcatagtcacttcccggattaaacagagccttttccatatcgatgcctactgcgtaagtctcagagatggcaagcttgtccacagagatgctatccttcccctcaccactctgagctatgcgaagtacatccgtctcacgccgacgttcctcatcattgcgcttacgaatcaaacgtcccccctttatatatgccgccggagtaattccgcctgcacgacctatcacatcactcagacgttcattcttcttcaacaacgaatagctgccgctgaaaagcacctcacccgcaaccgtcaccatgcgctgaacttggtaggcaggactgcgacgaacctggactacatcgaaaggttgcaggtagaaactaccggcatccgtcagaagaccgtccttgatgtcaaaggtgaatgtctccgcaagcttgctgctgtaggcagtactcttgggatccttgatgcggcgcgtcacgctcacacaggtagtggcggcagcctcggtaagacctcccgcctggacaatcatatcctctatcgttaagttatcggagtacaggaaagtaccgggattgagcacctcaccataaatggagaccgtctcgctctccttcaagtcatggataccgggaacatacagatggtcgttcttctgaaggggtatatcagaaaccgtaccgttcatgataccctccagatcaacggcaaccatttcgtgcgtaagatcttcacgctcacggtccagaaggacccgggcaaggaaagcatctccccggagtccctcagccttctttatcagctgcttcaccgtattcacctcaccgtccaactgataaagccccggacgatagacggcaccactgacctcaaccttgttctcaaaacggtcgagtacggcgtcaaccgtcattaagtcaccgtcgtctaaacggaatacggaatagtccatctcatccacattatatacttgatgttcacgtccgcttttacggatgatgcgtacagccttcttataggcatctcccataaagccacccgcatacttcagtaaggaagcaaccgtctcggcaggcttcatttcataatacatgggacgtttcaccttacctactatctcgaccaacgactggtagggactcacgataatcacatcgccctcctgcagacggacatcgtcattcatcttgccctgcatgatgaactcatagacgtccaaatgctctatcgtctctccgttacgaaccagacggatgtcacgcaagctaccgatattattcacaccaccggcacggtacaaggcatggaaaaccgtagaaaaggccgaaagtgtataagtacccggcaccgtgacctcacccataatatgaatctgaatggtacgtatatcgcctaaagtcagacggatctgtgaattgggatccccccctccgataccggaatagatcttggacagttcccgttgcagataagcgttggcttctttaacagtcatgccgttcagataaacgggaccgagatctttcacctggatactaccctcgggactgatggtctggcggatggtattctcggaagctccccaaatatctatgatcacctcgtcaccgggccccagccgataatttgccggagtagccagattcacactaggttcaaaggagagattacggttctggaacagattatgaccgaaaatctgtatgccggcagcctcaggggcggactggctttcaagtctctcatcaacaaccgctttctggtcatccagttcggcagcctcgtaggattctcccacagcaaccgaacgcttgcgcatctgtgagggagcttcagaacccgggacagcaacacccgagttctcatatttatccttgatgcggagcacctgttcgcgggtcacaccacggcgcaacagttcggcagtcatctgcttctgagattttccggctgcctgtgcttgtttcacatattcaaccacttgctcgtcggacatgcgctgggcataggcagaaccgaagaaaataaaaagacataaaatcagaaataagattcgacgcataatttaatgtttgttagattcttatatgtcacacactgaaaaaatcaaactaatccgggaaggtggaaccaaaggtgatttatatttattacttcgcgtagtaatgaaagagttagtaccacgcttcccggatattcaatagatattgggcatctactaaagggggtataacccactttgagttatatttttaatcaaataataagttattttactatattcattggcagaaatgccatataatccgtttctctggaggctatttttcgtaatacaatgcgtggaatccttttcactcattacatgaatatatcacttgtatgtttagctctatatgtctttaacttttcccgtgtctcttacattctccactccatttttttttgccttgcgagaaaactttcacctgttttagtcctcaagatattcccacggatagggattgtcaactacattccggaattcctcgacagcttcctgctgttcggcagtgagcgatgcggagtcccaggaagaaataatcttccgggcttcgtcgaccaggagctcatcgaacacttctccataacaggcagtaagcagacggagtttcaacagcgaagcgggaagggtatcaaggagattccaacaacggtttaatatctcctggaggtgatcctgcttctcgccatggtcaatgaacgatgcgttataacccatcaagagagcaagacagacgtttgcctgttcttccgtagtagtacctcgagcactggaaccatacaaagccgcagtcaagcggtaaacctcaccgttgcggcgggaaaggtcatcactatagataggactaccgtccatacctaaatacatcagttcgtgcgcagcacgctggagattaattgcttcttcgaaaagggaggaggacatttttttgaattatgaattgtaaactatgagttgtaaattatgaattataattcagccgatcacttctataaggtccggatggatggtagccatggcaacagcaatgacaccttgtatctctataaccacacgacggtcacgtgcaccctttactttcagaaaaataccctcctgacctgcaaagtcaccacccgtaatacggactctagttcctttcgacagattcaactcttcgggctggaaataaagcaaatggtcgttataggttccggcaacggcgatgaagcgctgcatctcatggtcgggaataattatcttctgaccactgcgagtatcggttatatattgcaaataagtaatttgagacttaacacgctgtacgtcggaaggacgtgcatggacaaaaaccagattacggatgacgggaaccaaagtacggactttcttacccttacggatacttaccttatattgcatggggacaaaacagccgaggttctccttctcgagaagatgcaccgcatcaagctccctgcggtatgtggcacgcatggcatgccagacttcaacctcgttatccgtttccattttcgttgttttgttcacaaaagagtgttcctctggggctttgaacccttggtatacacctggtattcaatcatttgcgagcaccttatgtaaaatacagcaagcattgtgcccttcttgccaacagtttttttgcagttcgtcattaccttctggtaagagactataaacgaacggattacaaacaaaaagcgttttttaaacgttcgtttaatggacgcaaagataagactgttttttatatcctcaaaatgtttaataaaaatattttggaaaacccatcgtatatcagtttaatctacagtaattcagtatattaagtatcttatttaatatttaaaatttccattcccttttattaactcattccctatttcatttcctgaaatttgacgtccattaaacgaacgtttaaaaaacacttccaaatcaaagtcatttccatttatatatcaacgcattaacccatcataaagataaaacccagctttttatctccatccttactccacaaaaacaaaaaacttgatatacctttgcatttattttacaaactacagtaattttaattattaacccaaaaacattagaaaatgaaggcaaaagaaacactccaaagtaaggaaaaaaaacaaaaagagacacccttaaaacggatgtaaagcacggcatatcagctcctaaagcaggagtaggacgtccctcaagcggggaggttataggaatactgccacaatataggaaagaagtcattaaagacatcatcctatggaaaaaatcaagatactttatagaagaaaagccgacaagcaacaaggcattggcacaatgggcatactcacatttcgactttagaacgccagactataaaagactgtcagaaaacactataatacaagagttcggtgaagtgtggcgggaaatgaaggtagcaggaaagatatagggaataaaacaaaaaagggcagaaaccacgaaacttattgacaataattaaatataaacaacttaaggaataaaccacttatctttgccgccactttggtaaggatgaagccacaccgcctatagatgccgctttctcaacgaatgcggcatctttttttatatacaagcgtacctcctgccaaactaatacaattattaattttaaagacaacaagatgagaaagtcgacaaagaacgcttcacttcacgaagcactgagaaacctatggaaaatacgtatcatgctggaaaagaactacacggaaacatgcgccacatggatggcccgacggatagaaagcctgatagaccacatgcaatacggccacgcactcatagcctaccacaagcaggacgggacattcaggctggcgaaagccaccttactgccctacaaggcagacttcagaagagattatgacatcacaagagtgacaagcaccatagccttttgggacgtggaactgcaggcatggaaaaccttccagctggaaaacttcctcgaatggagccccatatgctaaccattaaccattaatcactaatcattaaacactaaaaacaatggccatgatgtacgggggaatgctatacttccccctcaaagtaaatctattcgaagagatagcagtggaactggtggaagccaggttcggactgaaaggaacggcggcggtaatgaaactgctgtgcaagatacacaaggaaaacggatattacctgaaatggaacgcggagcaatgcacactgttcacaaacaaggcgggaaaggacatcaacgagcaggagatgcagggaatcgtggacatcctggtggagaaagcctttttcgaccccaaaacctataaggagcaaggggtgctgacctctaccgagatacagaaaatatggctggaagccaccaaaagaagaaaaagggacctcaccaccctaccctatctgctggtagagacggaggaagataaaccggacaaggacgagacttgtacgcaaaaacgggaaaattgtacgcaggatgcggacattttccccgaaaatgcatacaattccaaacaaagcaaagtagaagaaagtaaagcaaaagaaagtaaagcacttccccctcttactcccccgggggaaagtggaggagcgcaggggaatcctgatctggacattcccggatatgcctacaacaggaatacgcacaacctggaatgcctcatgctgaatctggaaaagctctacatcaccgaccgggaggaaatcaggaagatactgaagttatcggactacggcaggctgggaaactacgtctggaaaatattcaatgggacgaactggagcaaggtgaacagcaagggagggtacatcatctcggtactggcaagagagaagcggagtacgggaagctgattccacagggcacaagctatcaataacatgtcatgcaggaaatcaataacgtgtgatacaaaaaacaaatatcgtgccggcaggaaattaattccttgccgacacgatatgaatttcttcttcgtccttaaaactgtaccttataattatgccggtattcagtgcaaaacctctgcaattcaataaaaaatggctggaacacagcaaacagttcctcatcgtgctcttcaaggtaacgaatagccttgtctacggatatatcaatatgatgatattccaccatgatgttcaaagactctcttattccgttcagagtggcgtatttccgcaaacggtcggtcaggataaaatgccagatgaaacgtttgaaccgtaccggaagatagcggtaattgatgaggagggaaagatagaaagtccgggtatacctcctcaaggaaactccggagaacgactcgaaacgggaagccagcaaataatcgaaataaatatccagcaatacccccgaatagcgtccgaattcaggttgaagcctatgtaccacctcgcagacagccggatgacggtcggtatagtcgtcaatagcgcggtgaagctgaatacccttggctatatccggcggataattcttataggagcttccctttacggcatcgcctacaaaattgcccaactgtacttttctgttcgaaccggaaaggaatatatgtgccaggtagttcatgacaaaagatttaccagctccttgcaaagacactccttcacctcttccatcggcacctcgtgtcccagctctttctgcaaagaagtgacacccttgtctatgaatccgcagggattgatatagctgaaataacgtaaatcggtattcacattcagtgccaatccatgcatggtgacaaaatggctgctgcgcacgccgatggcacaaatcttacgggcacgggaagtatcgccctccagccatacgcccgttgccttctccaggcgtccggccgcgatgccaaacgaagcacaaacacggattaccgcctcttccagcagatgcacatactccttcaaccccaaagaaaagtcgtcaaggttcagaataggatagcagaccaactgtcccgggccatgatacgtaatgtctccgccacggtcaatatgatagagcgtagcccctatcctgcgcagttgttcttctcccagcaacatattcccttcttttccgctacgccccaatgtatagacatggggatgctcgcagagcacaatatgattgacatagcactctcctgcctgcttggcgtgtacaagtgcgtcaaaccattccgtctgccggctccatgctccggcataaggaatcatgttccaatctgatatttccagtttcatgcaagcaaatatagtacttttttgaattctaaaaagaacatttcattttaaaaacagaatgtcttccgttactttttcccggaaaagaattacctttgtgcgaactctaaacgacaaagcgtatggaatttcctcaagtcgacctgccagtagacatgattgcatggactgaagtaacggaagacattctaaacatatacaaacagtcgtgccgcctgaaagcatgcatctttgcactatgcatagaaggttccatcacggtatccatcaacttgatggatacggaaatcaagcaaggggattttatcaccctgcttcccggaaccatcatacagttttacgaacaaaaggaaaaagtgtgcctgggattcgtggggttttcttcccattgcctcaatggagtcaacctcatccagtctacattaagctccttctccaacatactggagtatccggtactggctatcaaccctaccgtcgcctcctatttcaaggactattttgccttatgggcacgcatcacgaccggtccctatcctcctgacaccaaaatggcacagagcactctgagcatgctcctcagcggcatagacagaatgtattgccaccgtccgcagatgcaaaaagggaacaagagccggaaagaggaaatatgccgcgaactggtgcagctcgtcatcgaaaactatacccgcgaacgccgcgcgcaattctatgccgacaaactgggcatctccctgcaacacctcagcaccaccgtgaggcaagtgaccggcagaaatgtattggacatcatcgcccacgtcgtcatcgtagacgtgaaagccaagctgaaatcaaccaacatgaccattcaggagattgcctattccttgaacttccccagtgcttctttctttggaaaatacttcaagaggcacatgggcatgagtccgctggagtataggaacagctgagaatacagccatcagaacctggaactcagacgaaggctgctcaaagccacggatacacaggaaagagccatggcagcacctgccagcgcaggactcagcaggatgtcatagacgggatagagtactccggccgcgacaaagatacccactgtattatagatgaaagcccagaacagattccggtacatgaggctcacagtctggcgagacaaccggaaaactttgggcaacagcagcaggtctgaagtcctgagagtaatcatggcggtgtccatcaacgtatcggtcccctttcccatggcaatgcttacatcagcacagctcaaggcttgcgcatcgttcacgccatcacctaccatggcgaccgttttaccctgaagctgcagcttatggatgaaatcctctttgtcatcgggcatggcatcggccacaaaacgcatgatacccaaactgccggccacggaagaagctgtacgctcaccgtctcccgtaagcatgcatatctcgatgtcctggatacgcagttcccggatagcttccatagaagtcacccgcaactggtccttgatggcaataacggcaagtaaatcgttctcacgcccaaagtagacaatactgtttccgtccgattcatattgtgtcagcatatcggccaggatatccgacaaattggcttgataatctttcagcagtttatggcttcctacccaatattccgcaccctgataggccactctgacaccttttccggtaatgttttcaaaaccgtccaggtgggcagggataacctgctcctccccttccagggccgtaacgattgcttctgccagaggatggtccgaagtagactcggcagcaagcagtacatctttataatgctcctcctgcccttgcgcccacagccagcctattaccgtaggatgtccttctgtcaaggtcccggtcttgtcgaataccaccacatccacattgcgcatctgctctaaagcggaagtgtccctgataaggatatgattgcgggcagctttattaaggcccgccgccaaagctactggagtggccagccctaccgcacacggacaagccaccaccaatacggacaaagcggcaaacagaccgtgtgacactacatctatgcctccgaagaacacccatataaaaaaggtcagcagggaaatgatgagaatgaccgggacaaaaagctcggcaacgcggtcgtcaatgcgttgcttctccggcagtacgcgggctgcgttatgctgccagcctcccaaccggcagatagccgccgacacatttcgccgggcacgttcctccataaactcgccggtcagggaaaaggcgatgatgacggcggcaaccccataatagacatgcggttccagcccgatgcccagccaataatccgggaagaaagtgttgaacacactgaacagaaaagccacagaggtggtaagcgccaccagacggtctatattgttgcggcccgaccgggttcccttccaggcaccggcataaaaaggagcgccgaaaaacagcagtaccggaattgccagtaccatctgtatttcacgggtatagggtacatgcacaaagactgtagaaaacagtatcagtacgatggcaaaaagccatgcaccgacgacgcgcaatcccgtgctgtgcatatccggcacgggatgtgccttagtaattatattgctcattcgatttattttttagatggttgttgttccgctttaataaagcaacaactggaatgagcagtttgttcaattacttcttatcgtcctgcttggtttccttgacaaactccgcttcataatggaacttttggaaaccttctttcaacttttccacattggtcttgtcggcatcatacgtgatggttaccgtctttgtcttcaggtctgtgtggaagtccttcagtcccttctcaaaacggatgttattgtttatcttccttacacagttctcacacttcatctgtgctaccttgaacacggctgtacggatgtctttcgccattgcggcagatgcacagaagagtacaactgccaaagtcattaaaaatcttcttgttttcattgtttcgctattgatttaataaataatattatattctcggcaagttaaaacggacacctacataggcttttgccccatgcatgggtccccaaaccatcgtagcatcaaagttgcttccccagggattggaagcatcgatgatggggtttttctgcttgaagtttgtcaggttctcgccaccgacgtatatagaccagcgacggaaatagcgcgtcacctgggcactcaactgctcgaagccgccatagcgcctttcccacgaccagttgccgtctgtcagttcgtatggagccggcatgcgcccgccaccgttcagttgcaaagtcacatcaaactgccacaatcccaaaggtgtctgataagaagccgtcagcaaacctttatatttgctggtaaggggtttctccatcagctctccgttgtaattcgtcttggcatccgtccaacggtaagccgcggtaaaggtgaaacccgggaagaacggatagcttgcctccacctgcactacctgcgaataggaacggccgtgaaggttgtaaaacagaacggcatgcgggtccgtatccatgtctaccaccacctgcttgctgaaatccgtgtaatagtattccgcattcaggttcaaggttttgccgaacaagggaatataggcggaagtgcttgcgccatagttccaggcctcatcctggtcaagacgtttggcgatgtctatccggcggctgcttgccagcaggtagttattctcggccagcacatggttcgtgcggtatccctttcctgccgaaagacggaaatgtacatactcgttgggattgtacttcacatggaaacgcggagtgacgaaatagccgtactcactgctatggtcgccgcggataccacccatcagcaccagtttatcgtcccagttgtaggtgtactgcacgtaggcgccggggacggcttctttggtgaatttcttcgtcaaaggctgtgcggcgtcattgtccaggcgatagtgctggtcgtaggagtcatagttgaagctcagtccggcagaaaggctttgacgcttggtcagttccgtctcgaacagcaaggaggcataagcgttgtgctggtccacatcgtagattttccgtccgtacaaggcatcctgcttgtgcagggagccggaaagaatcaatgccaggttggtgttcttctccttattaaatatataggcgttcttggtgaaggcttcgtagcggtcggtacctatacttatcttataagggtctgccagggacgttttgccatggctgacttgcccgctgttgcggtcttctgtaagcactttgatgcctgcctggaagacgtagcggtcgcccatgtatgcccagcggttccagaggttgtactgctccacacgggggatgtcggcaaagccgtcgtcgttgctgtcgtgagctttggtctcattctcgtaatgcgccagcaaagaggtgctccaacgtttggagagtttcaccgtggcatcggcattggcttcgtaacggttggtgctgctggcaaagaggttggcggaaaaccaatcggcttcgggcaactggggtttcttgaattccacattgatttgtcccgtgatggcctcatagccgttcttcacggatgaactgcccttgctcacctgaatactctgcatccatggcccgggtacataacccagtccgtagggggcggcagagccgcggtagttggggatattctccgtcatcatttgcacatacgtaccggacaagccgagaagcttgatttgcttagcaccggtggcggcatcagagtaggtgacgtccaccgagggattggtcacaaaactctctcccaggttacagcaggcggcacgactcaactcggcgctacttatcatatcttcattcatcacactgttgcgcagcttcatggtgcccaacttacggctgaccacattcacctcgctcagttccaccccttcgcgcaagacaatgtcgagcgtctcattgcggttactgacgtgtatcgtatcgttctcaaaaccgataaagctgactacaagcatatgcttgtcattgggtttggacaaggagaaagtaccgtccgccgaagtggtggtaccttgggtggttccctgccagaagaggttggcacccgcaatcgggtcgcccaaattatcctttaccgttccctttacctgcgcctgcaaggcggtgaaagagaacagaagaatggctatcaaactatatttcatttctgttttatacttaaagaagtgattaaaaaacaaacagttccctccgggcaatccaggtcattgccccgtataaaacaacactaaatgagaagcgtggaatagagcgccagataatgacgcgagccgacgacatatggcggtgctcctgaaacaactctcggagtacaagccacctgcggcaaggagtgatcaaacagcggcagttgctcgcaaaacagtgtaaggaatggcacgaacgaaacagactcgtgtgcatgcttcacgaaatccaccttgtagtagacggctgtacagccggtatccttgcatgttttttgtgaaccacgatgtgcatgatggcatttggaacagccggaggtgcagcaactttgtgtcgtctcgcatacggcacagcaatactgaactacagaaatccccactccgcttataatgataagggaggaaaagagtacagccagtatgtaacggagttccttcataagcgctgcaaagatagaaagttttaaccgtttgccggaattaatttttccttttttatgtgtgcagttcgttaataagttctatatttgtcgataaagttttttgattgatatgttgatttataaacgaaattcaatatgaaaaagcaaactgtcagcctacttgtccttctgcttgcggcaagcggctttttcttttcctgcggtaacaccgtgaacaaaaacgcatacgcgttggagttcgacagtatacaagtaaacgaaaccgtacatctcttcggagacacagccaagccggcctgcaacctcatcctcaactttgcctacgccagccagtcatccgacgtaaggctgaaagacagtctgaacaccttcttcctctctgcctgcttcggcgacaagtacatggcgatgacacccgaagaagctgtcaagaaatatacggagaaatatgtcggcgactaccgcaatgacctggagccgatgtacaagaaagacgaggaggacaagcaggacgagcagagcataggagcctggtattcctattataaaggaatcgaaagccatgtgcagttgtgcaataccttgatgctgacctaccgtatagattacaacgaatataccggcggcgcacacggcatctatatgtccaccttcctcaacctcgacctaaagaccctaagccccatccgcctggacgacctctttgaaggcgactataaggaagcgctgaccgacttgctttggaaacagctgatggcagacaacaacgtcagcacccgccaagagctggaggacatgggttacgccaccaccggcgatctggagcccatcgagaatttctatctggacccaacgggaatcaccttctattataatgtatatgaaattgccccatacgtaatgggagcaaccaaaatcacgttgtcttatgaggacatagcccatctgatgaacggtgaattcatcacattgagcagtgctataaaggcagacggtgaataggaactgtaatcaattgtctatcaacataaaattcacaatggatttaatactcaaatatttcccggacctgacggaagaacagaaacggcagtttgccgcactctacgacctctatctggactggaactctaagattaatgtcatttcacgcaaagatatagagaacttgtacgaacaccatgtgctgcactctctgggcatagccaaggtaatcaggttcagaccggggacacaaattatggacctcggcacgggaggaggctttccgggaatcccgcttgccatccttttccccgaagtacaattccatctggtggacagcatcggaaagaaagtacgcgtagcctccgaaatagccaacagcatcgggctgaaaaacgtcaccttccgccatgcccgcgcagaagaggaaaaagggaagttcgactttgtggtgagccgtgccgtgatgccactgacagacctactgaagattatccgcaagaacatctcctccaaacagcagaatgcattgcccaacggactgatttgcctcaaggggggcgaattgggaaacgaaaccatgcccgtcaagaacaagaccacgttgtgggacttgaaggagttctttgaagaggagttcttcgagacaaagaaagtagtatatgtagggggataaatctaaatacataatatgaaaataaagagattcgaatttaatatgttcccggagaactgttatgtgctttgggacgaaaccaatgaagcggtcgtcattgacccgggctgtttttatgaggaagaaaagcagaccttgaaaaacttcatcatcaagaatgggctgaatgtgaaacatctgctgaatacccatctgcatctggaccatatcttcggcaatcctttcatgctgaaagagttcggtctgaaggccgaagccaaccaggccgatgagttctggattgacgaagcgccgaaacaaagccgcatgttcggcttccaactgcaggaagcccccgtgcccctgggcacttatctgcacgatggagacatcatcaccttcggcaatacagaactggaagccatccatgtgccgggacactcgccaggcagcctggtgtactattgcgcggcagaccactgcatgttctcgggggatgtgctgtttcaaggcagcatcggccgtgccgaccttaccggcggcaacttcgacgaactgatagagcatatttgcagccgtctgttcatcctgcccaacgacacgattgtctatcccggacacggagcaccgactaccataggaatagagaaagcggagaatccgttcttccggtaaatatacagcaaacttttaaatcattacagccatgaaaaacgacctattggcctaccgccacatcggcatcagcgaaaaagacgaggagaagatgctccaaaaaataggagtgaaaagcctggacgagctgattgataaaaccattcctgccaacatccgcctgaaagaaccgctggctctgcccaagacaatgacagagtatgaattcggacagcacattgcagggctggctgccaaaaacaaactctacacaacctatatcggtatgggatggtacaacaccatcactcctgccgttatccaacggaacgtattcgagaaccccgtttggtacacttcctataccccctatcagaccgaagtctcacaaggacgcctggaagccttgatgaacttccagactgccgtatgcgacctcaccggcatgccccttgccaactgctccctgctggacgaagcgactgccgcagccgaagccgtgacgatgatgtatgccctgcgtccgcgcgacatgcagaaatcgggcgccaacgtggtatttgttgacgaagccgtcttcccgcagacgctggcagtaatgactacccgtgccattccgcaaggtatcgagctgcgtataggaaaataccatgaaatggaattcacaccggacatcttcgcctgcgtactgcaatatcccaacgccgccggcaacgtggaagattatcgcgccttcgtggaaaaagcccatgcagccaactgcaaagtggccgttgccgccgacattctgagccttgccctgctcacccctccgggagaatggggggccgacatcgtcttcggaaccacacaacggctcggtacaccgatgttctacggcggaccgtcggcagcctactttgccacccgcgacgagtacaagcgcaatatgccgggacgcatcattggctggtcgaaagacaaatacggcaagctgtgctaccgcatggcgctgcaaacccgcgagcaacatatcaagcgtgaaaaggcgacttccaacatctgtaccgcgcaggcactgctggctacaatggcaggcttctatgccgtatatcacggtccggaaggcatccgcaccattgcggaacgcatccacagcattgccgtattcctggaaaagagcatcaacagactgggatacaagcaggtcaatgcacaatatttcgacacgctccgctttgcactgcccgacaccatttcggcacagcagatacgtaccatcgctctaagcaaggaagtgaacctgcgttatttcaagaacggggacgtaggcatgagcattgacgaaactacggacatagccgccgtcaatgtactgctctccatctttgccattgccgccggaagggattgggaaaaggcaagcgacgtacccatggcaagcagcatcagcgcggagatgaaacgccaaagcacctatctgacacacgaagtattcaacaaataccatacggaaacggagatgatgcgctacatcaagcgtctcgaccgcaaggacatctcactggcacactccatgatttccctcggctcgtgcaccatgaagctgaacgctgccgcagagatgctgccgctcagccgtccggaattcatgaacatgcatcccctggtgcccgaagaccaggccgaaggttaccgcgaactgataagcaacctcagtgaagaactgaagataattaccggctttgccggcgtcagcctgcaacccaactccggtgcggcaggcgaatatgcaggactccgcgtcatccgcgcctatctggaaagtataggacaagggcaccgcaataaaatactgatacctgcatccgcacacggcaccaacccggcatccgccatccaggcaggctttaccaccgtgacctgcgcctgcgacgcacaaggcaacgtggatatggccgacctgcgcgccaaagcggaagaaaacaaggcagacctcgccgccctgatgatcacctacccttccacacacggtatctttgaaacggaaattgtggaaatctgccacattatacacgcctgcggtgcgcaagtatatatggacggcgccaatatgaatgcccaagtaggcttgacgaatcccggctttatcggtgcggatgtctgccatttgaatctgcacaaaacgttcgcctctcctcacggtggcggcggaccgggcgtaggtcccatctgcgtggcagagcatctggttccgttccttccgggacataaattgttcggcaatgccgccaaccaggtgtccggagctcccttcggcagtgcaggtatcctccccattacttatggctatatccgcatgatgggaacagaagggctgacacgggccacaaagatagccatcctcagtgccaactacctggcagcctgcctcaaggatacgtacggcattgtttatcggggtgctaccggcttcgtgggacacgaaatgatactggagtgccgcaaggtgcacgaagagacgggcatcagcgaaaacgacatcgccaagcgtctgatggactacggctatcatgcccctaccctctccttcccggtacacggcacgctgatgattgaaccgacggaaagcgaaagccttgccgaactggacaactttgtccacgtgatgctgaccatttgggacgagattcaagaggtaaagaacggcgaagccgacaagacggacaacgtgctggtgaatgccccacatcccgaatacgaagtggtagccgacacgtgggagcacagctatacccgccaaaaggcagcctacccgatagaaagcgtgcgcgaaaacaagttctgggtgaacgtggcacgtgtagacaacacgttgggagaccgtaaactgttgcccacatgctatggatgcttcgactgatgaaaagaaagcgtaacggactattttatagtaaaaaagaagaaaccatcaattccatctcccatggcatcggcattgccatgggagtaattgtaagtacactattcctgataaaatgctaccaggcgcagaatctttgggcagcatgcggcgtatggctctatctgttcggcatgggaggctcctatcttgcctccacactctaccactccctgaaacatcataatccgtggaaacgacgcttgcggcattgggaccatgcagccatctattggcacattgcaggcagttattcccccatcatactcattgcattgagagaggacggcggttggggctggggacttttcggcttcgtctggctatgcgccatcatcggtactgttgtcagcttccgcaagatggaggagcacagttacgtggaaacagtatgctacatcctgatggggctgtccgtactggtagtattcaagcagcttttcgccctctcccccacagcctgctactggattattgccgagggggtatgctacatcacgggagccgccttctactccttgcgcaaagcacggtacatgcattcggttttccatttctttgtattgggcggttcagcctgccacatggtggctgtatgggacatactggtgaagatgctgtaagcaaacggcaagcgcacaaccgctaaaagaagttaataagtatctctttcccttgcttttctccataacttaccctacgtttgcagtgttgtacatcagtgcaacactaataaaattatgataacgatagagaatacgagctacggttacaagtccaatccacttattttcaacaacatatctttggaaataggaaacggtatatatggacttctgggagaaaacggcgtaggcaaaacgacgctgatgcatctcatctgcggactactcttccccaaaaacggaaagtgcagcatagacggaagaaacacggcagagagacagtccgaagggttggcccgttacttcttcctgcccgaagagttgcagatgcctaccgaaagcatcgccagcttcgctgcacgccattccgtattctatccacatttcaatcaggaagaattcaagctgaacctggaagagctgaaaatcaaccggaaacaaaaactctcttccgtctcctacggacaacagaagaaggcaatgctggcatacgcctttgccctgcatactccatacatcctgctcgacgaaccgacaaacgggctggacatcacctcccgccaagccttgaaacgtatcatcagccgcagcatggacgatgaaagcacgctgctcatctccacccatcaggcgcacgacttcgagaatctgctggaccatctcgtcatccttggcaaaggcgaaatattactgaaccgttcgctggacgaaatcagtaaccggcttctctttgcccgtacggacatcctgccggcagaaagcatctacagcgaacaagacttgtcgggccatttctccattctccccaacgaggacggagaagagaacacaccggacatcgaactgctgtataaagcggtgttgcaacaaccggaaaagatacagagcatgtttcaatgaaaatccatcatacaaacagaactatgaacgcaacttttaatctgaaacgcttcctgctactggaacaatataaaaggaatgagaccggcaggcacctgctttggtcggcagccgtcgtatcgttcatctgcatcctgtgcatcctccacgacataaaccgcggtggaagttactacggcaaacatacctctgccaccgaattctcccgctacgtactatggtttatcctcatggccccctgcctgctggaaacaaatttcagcaaacacagctccactctcgatatactgctgccggcatcggcattcgagaagttcctgcatatctggataaaatacctgctgctgcttcccctattctgcagtctgctgatagcctgcctcaaaggtctgctgtccttaagcggcagcgagttcctgcagtattttgcaacgcacatcacgatgttccggatacacaacacccagatactgacctatgtaatcctgcatgcttccgccttcatcggatacttcgccttcagccggcaagtcctgctgaaaagtttcaccatctttgtaggctccattgccgtctgcataggaattgtaacttttgtggcctccctcatgcccgaagccagagcggacggatactggatggataacattgccacatggccccacaccaactatccgctgtcggccggtgcacaagccatcgtgactttctgcaattatgcggctcctatcagtgtgctgctcggttcatgggcatcgagctacttcctgctcaaagaaaaacaactgtagcctatggacttcaagaccaacaagccgatataccagcagattgtagacttctgtttcagcaagattctcacccgcgaatggcgggcggaagagcgggtggtatccgtgagggagctctccacacaactggcagtgaactcgcgcaccgtgttgaaggcctatgaatacctccagacggaggacatcatctacccggaacggggaatggggttctacctctccaaagatgcggtgaagaaagtgatgcgaatacagaagaaagagttttttgaaaaccagcttgccgacatgttccgcagcatggagctgctcagcatcagtatagaagaaataacagaacgatataacaaacttaaaaaagacggttcatgaagagatacgcaaagactgcattatggattaccttcggactcctcttcggacttacgattgtcaaagtttcgacactgatgtacgagatttattccttcatgcattcctgactttcatcggacagacgaggaaagtataaacaactgacatacaagcctcaacatctttccttaacggaaggagtggcttttgcatccctatccaacagtaacagactaatacaaacgattatgaaaaccaaactttttttactattgcttgccctctccgtactccgtacgcaggcacagagcctctccatcaaaggacgcgtcacggacacttcgcaagaggcaattatagccgccaatgtgtcattatggaccatagactctactttggtgaccggagtaacctcggatgcacaaggcaagttcaccctccataaaatcaaggcaggcgattaccgcctttccatctccttcatcggcctccaaagtgaaaacatactgctgaaactgaataaaagcctcgacctgggcgatgtacagttgcaggaagatgccgtaagcctcggtgaagtgacggtatccgccagcaatgtgctgcagcgggtagaccggcaaattatcctgccttccgaaagccagctgaaacgctcgttcggtgcctacgacctgctgaacaatctcggcattgcccgtctgcaagtggacaatctgagcaacagcatgagcgtcagcggtggtgggtccgtacaaacccgtatcaacggcattaaagtgacagacaaggagatagcggccgtcagagccaaagacgtactgcgtgtggagttcatcgaagaccccggcaagcagtacggagacgacgagctgggcgccgtagtcaacattatcctgcgccgccgcgaaacgggcggtgttgtgaacttccaactctccgattcgccccacaccctatggggagagaatttcctgagcgcgaagttcaattacaagaactccgaatggggcatcgactacttcaacaagaacggcaagtatcacagccgcctcgaatcccatgaaaccttctatctgggcgaccgtaccatcgaccgcatcaaggaaggcatcgaagacgagtctccctccctgagcttcatcaacaacctgaatctgacgtacaatctgacgaaagcggacaaatatgtattcaatgccattttccgtaacaacctcagcaatgccccctaccagaatgagctgaacaagatgtgggcagtgggcagcacggagtccatctattcgtacgtcaacaaccacacatccagctactctccggcgctcgacctttacttccagcataccctgccccatcagcagagcatccaggtgaatgtaacgggaacgctcatccataccaagaacaaccggaaatacaaggagtacaaggacgagaacgcaccgctggcagacatccagacattagtggacggcgacaagcgctccgtcatcggcgaagccatctatgaaaagaacttcaaggaggtgaagctgagcggcggtgcccgccactatcagatgcggacagagaatgagtataaaggttccaaccctaccacttcgaagatggaccagtcgcagacatccgctttcttcgaggtgcagggcaaggtaaaggacttcagctatgcgggcagcgtaggcatgacgcgcgcctggttcaaggagagtgaggaagaccatgcctactataccttcacgcccaccgtgcggttgagctataatctgaagaaggcgggattcctgcgctaccggttcaacatcagtcctgccataccgtcactcggttcgctgacggatgtggagcaggcgatggatacgatacagatagtccgcggcaacccgttgctgaaaacgtatcaacagttcacgaactccttgtcttacagctattcgaagaagcagttcaatgccaatctgagcgtgcgccaccagtattatgacaatcccatcatggaaagcatcttcgtggaggacggcaaactgatactgaaggatgaaaaccagcggtcgttccaaagcctgaatacggaactgatggccggcataaatggcgctacactgttcggactgaaagatttcctgacgctttatgcttcgggaggatatacgcgcagttggtcggaaggcctgaactatagccatatgtacgatgaattctattacagcgtgatggcgcaagtgcaatataaaggcctctcgctgctcgggcagttccggaaagtgcagaacaatttcttcggcgaaaccattaaaaagaacgaaaaccagacggcattcatggcaatgtacacccggcagaaccttcaggcgggaatcggtattatgtttcccttcaccaataattataaagtgggaaaagaaagaatcagcaaagtggctcctttccgttccgagacattcgtcagggagacgggacagatggtcgtgctgcgcgtgggttatacattcgagttcggacgcaagcacaaggcaggcaacaaggggctgaacaacagtgatacggacagcggcatcatcaatatgcagcgataacccatttcctctgtgaagaggaagcccaacggagagtggcggaattatacgttattttgcttcatgtatgattaattacctgaccgccacctctcctgcgggtatctctgtttagcggatgatggtcaccgtaccttccttcacctttttctccttcaccggagcatcggcgggagcatatcccagggctgcgcagccatataccttatggctctcgggtacacccagctttgtcaagaaagcgcggacatcggggtcgtcgcaggtctgccccaactggttaatccagcaggaaccgatgccgagggacttggctgcaaggaaaatgttctccaaggtgcaagcgcaatccatagcagcccaccattgggtaggctcgttggagacaatgaccagcgtgggggcatgatagtagcagcaataagtctggctatgtccacgttcccgtgtatgagggtcgtcactcttggcaaaggcgcctttgattttatcattcaactctttcagtacttccttattctgaatggcagtgaagtgccacgtctccaaatgcataccgttgggggcataagtagccgcctcaaggataagattcaaatcttctgcggaaacctgctgttccatataggcacggacgctacggcgtgccttgatagtttgtaatgtctcgttcatttgtttaattgagaattgatagttgattattgataatgcaaatcggtgcgtattcagtagggctgtttcatcgtttcaccagtccaatcttcacattcagcttgaagtaccagacgccgttctcgcgctccaagaagccgtatttatctttctctacggcacctttctccaaacgcgtgttctgataaaggaagtctgcaaagacctgcggacgggatttgtggtagcagagtatctgcccgttgccgtccgtcaggaagatgccttcgacggcagagtccgtaccgttataaattttggcagggcgcatgccgagggcaagcgccagcaagaactgcttcatcttgaactcgtagaagcggtgcttgtttatcaactcgtcctttatcttcagcggattcatctccttgatgcgctccgtcaattcgctgatgcgggtgatgccgtccaagtgcatcaagcgcaccatctcggcaagcatgcgggggaagtggaggtctatcatcagcaggttgcagcggaacacgcggtcggcaacgtcggcatacttcagcacgccgcccagtcgctcaatcatcatcatgcgttctgctacttccatagaagattccggcagggcattcaccttgttcaccgtgggcacggcaaacttgacaccgctttgctccagcttcagattcgccgtgcgccctccgtccagcaacggattcatcggggtaaggcgacaacggacattgaagcccgttagcggagcttcgggatgccagaaagctacggagaaatcggtacggtcctccgtctttgcttccaggtcgaagatattgacagcatccaggaaagcttccaagccttcagtcacttccacttcctcgcccgaaacgttcttcaacagatgcagaaccaactctgccgcatcaccaaagtcttcgcgggggaaacgcagttcctccttctcgcccggaacaaacgaaccgtccttcccggtagttccgctgacaatgcgcacttcctgctcttcgatatagtaacggcgcgtaccgtcatgctcttccctctgtatcaaggcaacgggccagcgcagggtttcgtctttttcagctttcggtgtgcccggtgacacggctccatccgccagcaggcgaaagaaggtgtagagctcgcccagttctctttttgttgcactaaatgccataaactttcttttgtttaaagggggggagtcagcctttcataagaagtggtaccgtttccgcaaagaaaacagtctgttcctcataggaaaacaacttgttccgttaaaggaaacgaacaacttccctattaaaaggggctcttatcccatttgttgtattattcaaacctcaatgtttctactttctccaaccgtgcccgcaacttcggcatcatggactgacggatgcggagcgtcatacggcagtccatatcatacgactgttccagaatttccggctcctcctccttcaccacccgcatcacatcgttcatgaaaggatattcgaaaaggaaggtaaccgtctcatccacggtcttttcaataacggtggcggcagcaatggcttcggcggcggcggctttataggctacaatcagtccgctcgtacccaatttgatgcctccgaaataacgcactacgataatcaatatatccgtcagttcgttggaattgatttgtcccagaatcggcttgcctgccgtacccgatggttcgccgttgtcgttggcacggaagtccttccgctcatggcccaacatgtaggcataacacacgtggcgggcgtcgtagtatttcttctggtaagtttccagatgcgccttcacctcctctactgtacgcaccggcagggcaatagcaatgaacttgctgcgcttttcagtgtaaatgccctcggaaagggcaacgatggttttatacgtatcttcgctcatgctgcaaagataatgcaaaccgaagagagaactttcatgcttgcatgaaaaaagttatgttgaagtgcagcttatcttatctaaagataatgcaaaatcaaaagcagcagaaataagcaagctgatttctgccgaaaagagttatctttgtacgaagaatcagatttataatcaaacagaaaaaatgacagacggaatcaagacattgcactattcggacctcttcctggcaatgtatttcgagggagggagaagctgcacgcaccggaatcattcgcacgtgttagtatatatgtactccggtgaaatggttatcgatgaaagaggcaaaatcactcggctgcataaaggagactgtgcctttatccgtaaagactttagtgtgcaaatgaccaaacaagcctggaatggagagcagttcaaagccattttcctgatgttcactcccaagttcctgcgtgacttttacagcaggctgaaccgtgacatcctgcctaaagatgccaaacgggataaaataagcttgtacaagctaccttccaaccgccccgacattgtaagtctgttcgaatccatgacaccctatttcgattcgagcatccacccgactgaggagttgctgcaactgaaaaggatggaggggatatacgtgttgctcaatacgagtaaaaacctgtatgcttccgtttttgattttgcagacccgtggaaaatagacatattggactttctggaacacaattacatgaacgacatatccatggaagaaatggccaattataccggccgcagcctatccacgtttaaacgcgatttcagaaaatgcagcacactctccccacgggaatggctgatacagcgccgcctcgaagccgcccgtgagctgatacggaaaggagggcgcaaagtctcggaaatctgttttgaagtaggcttcaagaacctctcccatttctcgaaggcttataaagccacctacggtattcctccgacagaagacatacagcaggaagtgagtctcacatagattgcggagctttttctatccgtggactgcacggcaaagcatattgaaccgtacaacaaagccattgtagcatagcctccttacatttgtacccgaaaaatgattagagtgtacaacaaattaaatcaaacgattatgaaaagtatttttgaaaaagatttgtcgggagagatggtttcacccaacgaaccgggctacgatgcattaattgacgacattttcgctaccatcaagattgccacagaaatgaatacgggttaccgcacccccgaagaggtacacgaatatatgggcaagattctcggtaaaccgcttgaagaaagtacaacggtgttgccgccactctacatcgactacggtaagcctgtcactatcggaaaagggtgcttcatccagcaatgctgcactttcttcggtcgcggcggcataacgattggcgatgaagtatttatcggaccgaaagtcaatctgattacaatcaaccacgaccccgatccggagaatcgcaacgctacctatggccgtccgattatcattgaggataaggtatggataggaatcaattcgaccgtccttcccggagtacgtattggctacggcgcaattatcggggcgggcagtgtagtgaccaaagacgttcctcctatgactgtggtagccggaaatccagccagatttatcaagaaaatcaatgaaacacaccgaaaagattaaagcagattcatgaaaaaaatagtgattgccatcgattccttcaaaggatgcctcacctcggcagaagccggagaagctgccgcccaaggggtacatgccgcatgtcccgaacgccggaccatcgtgctccccgtggccgacggtggagaaggcatgctcgacgtcctgcttgcagccagtaacggaaaacgtatcaccgtccgtgcccacgacccgttgatgcaaccgtgcgatgccagttacggcatctccggagacggcaataccgcattcgtagaaatggctgccatcagcggcctgccactggttcctgccgacaaaaggaatccaatgaaaaccaccaccttcggaacgggcgaactgatacgcgatgccttggaacggggatgcctccgtttcatcatcggacttggagggagcgccacgaacgatgccggtctgggaatgctgcaagcattgggattccgtttcttcgataaagaaggacacgaagtgggaagcatggaaaaaggcatcgccctatgcggtgcccttctatcggaaatcagctccatagacatctcttctgcccatcccacactgaaaaaggcatgtttcacggcggcgtgtgatgtacgcaatcctttcttcggtcccaatggagcagcccacgtattcgctccccaaaaaggagcagacgcggatatggtgaaggaactggatgttgctatgcagcatctttcggacgtcatattccgcactaccggcaaagacgtatccttgcatcccggtgctggtgcggcaggcggtatggggggcggtctccacgcatttctggatgcacagttgaaacccggcatagagcttcttttggaaactctggactttgcagaaaagattaaggatgccgacctcctcatcaccggagaagggaaatcggaccggcagactcttatggggaaagtaccttcgggcatcttgcaggaagcaaggaggcaacatattcccgtcatcctgctggcaggagcgatagaggatgccgggatactgaatgcagctggattccggggcgtattctccattaccccctctcccgtctctttggagcaggccatgcagcctgaatttgctcaagaaaatatccgaaggacagtggagcaaatttgccggattttcttttaactccctctaactcctttaacataccgatagcaccagataccgactacatcggcaatcagccagccgatggggatggaccaccagatgcctgtcaccccaatctcaggtatcgaagcaaaccaataagaaagaactacacgggtgcccagcgacagcacggtcagcacaacagacatgcccggcatacggatggcccggtagtatccgtacagcaaaaacaagatgccgatgccacagtagaaagcaccttcgatgcgtaggtacgccactcccaccgcaataatctccgtttcgtccggacggacaaagataagcatcaacggtttggcaaagatgaaaaccaatacggacacaaggagcgaaaaaacaacagccgtgacaaatgcactgcgaacaccccggtggatacggtcgtaacgtccggccccgaagttctgtgcaataaaggtggaaaaggcgttcccaaattcctgcacgggcatataggcgaaagagtcaatcttcacagctgccgcaaaagctgccattaccgctgttccaaagctgttgacaagtccctgtaccatcaggattcccagattcatcaccgactgttggacgcaagtcagtgtagagaaggaagctatttccttcaagcaagtacggtcaaaacacatatcttcatgatgccatcgcagttccggacgccttctgtaagtataaatgatgatgcccagagcagctactccttgagcgaggacagtggccgcagccgcaccctgaatcccccaatccagttgtaggataaaaaacaagtcgagcgctatattcagaacgacagaaactgccagaaaccaaagcggagtgacagaatcccctactgcacgcagcagagatgcgtagaagttatagataaaggtgaaaactataccgcagaagattatccacaagtagctgcgcatcatgccgtatatgtcttgcgggacctgcaacagccggagaatagggtcgagccagataaaaacggctacattcagtatcaatgtcacgatacctatcagtacaaacgaactgaatatgctacgacgcagtgctacatggtttccggcaccataatgtaaagagaacacagtgccactgcccatcgccagtcccagcaaaacggatataaggaaaaccatcaatgtgtatgccgaaccgaccgccgccaacgcccctgcaccaatgcattggcctacaatgagcgtatctgcaatgttgtagcattgctgcaaaaaagaccctaccatcatgggtagggtaaaatgtaataaagtaccggttatgcctccttgagtgaggtctcctttccgtagcatcctgcttttgtttttaagagtttcatttccgggtacaaagatacaaaaccctccaacaaatcatctggactcgacgaagaaagaggcatgtaataaaaaaagcagagggttaacctctgctctccatactgtttttgtcaggattcagaatctttacgacctgacgaacatctctcttgtctgcattaccgtaaaggccaatctgttgtccgggtactgttcccttttcatgttctgcctgggacaatgctactttcgggtcaatatgccctgctttcttatctatattcatacctattgagtttttctaaattcttatatgagaacaagataaaaaagcaaattgttcagcagtgtcacgagatatttagtaattccacttcaaatatcagtgtggaatacgccggaatgggtccactggtacgtgtaccgtatcccatggtgtaagggatatatacaatccaacgacttccgggatgcattcgtagcaaggcaatctgccagccctcaatcacttcattcagacgaaaagcctccggacaattccgtttccacgaattatcgaactcacgcccattgataagagtgcctttataatgcacagatactacactgttgagacgtggtgtcagaccgtctctgccttcctccaatacccgataaagtatgccgcaaggcaattccttgattccttctgccgtacgcaactgttccagaaactgttcgttctgcaatttatattcttcttttctacccatattgactttttcaatactttacaataatttgtgcactgctttcttgcagttccgcatatccttttccgtcagctcaggatgcttcttagtacctcccctctcaatggttttcacaatcttgaaaccactccatttcagaatctccctgaaagctctcaccacaccgtgcgtctgattatagagaatattgaaaggataaggggtagtacaagtacttaccacaatcgctttcttgcccttatgaagcggaaggggcatcccccaagagttctcccccatcataccgtaaaccatacggtcgaaaagcactttcacttctcccggcatgtttccccaatagcaaggggcaccgattatcactgcatcggcttctttcatagactgcaacactctctgtgccccatcctcgggcagacaacacttcaatgaactgcgacacttcatgcaaccgatgcagggatgtacctgcaactgtggaacgtctatataaactgttccaactccgcagccttcaagttcctgcttcatcagctccaacattttcgacatgttgccatgacggcggggactaccgttaagaatcaataccttcattgtatactctcaatttttcggcaaaggtcggcattttctacataataaccttacttcttgttcagttttagttctgtaataaaagccactatcagtccgattccaccaacacccagcacacaagccccataaataagggaaacagtctccctatacatccagtctctgtccgcagtaaagtaattgggaatcgtcgcatagcagataagataacccagcaataacccaagtcccataccagccaacagacatcctattttcagggcagagaacgaaaagctacttccacgtaatttaggcgtatccatctgagggagtagtccccgctcgtccatcttctcaatcagcatgattctttccttcttacaaacaaacagctcaaacaatttgtaaactcctaaagtaatgattgtcatcaccgcaggcaccataataaaatccatcatattcgtttcaatttaaattagtaatttcgtttctttgtaccctttagacgcggcagtttacatgaggttacacttttccggaaaaatattttttcttccgaaaatctgtaaccaaacaaacaaatctgcgtctaacagacaaaatgaaagacgacgagagacatatcatccagcgcatcttgaggggagagactgctctttacgagcattttctcaacacatacggccagcaggtattcatcctggtggcccgtatcgtctccaaccaggaagatgccgaagaactgacccaagatgtcttcctgaaagccttccagcatctctcgtctttcaagggcaccagttctttttcgacgtggatttattcgattgcatataatacggccatctcgagtgcacggaaaaagaaatttgatacctttgtcatggatgatacactgcttgccaacatatccgatacacaagtagatgaagccttaaatgatgaaggggaagagcaaattgccaaattgaacagagccatggagcaactcgattccgaggaacaggcactgataagcctgttctattatgaagaaaaaacattgaatgaggtcgctctcatccttggactgacggaaagcaacgcaaaagtgaagctacaccgtatacgtaaaaagatttatgtgttgatgaaacaagaaaaagtatgaacgaagaactaaaagatagaggattgaaaaaggcggtaagagaacagactactttccgcctgccgtccaattttacctaccgcaccatgcagaaggtagaagaagccatacgtctgcgcgagaagaaatcagaaagaagaattctgcttgcaactattgccgctgctatcttcttgataggtgtcagtgggacaggattggttctgtacttcggagacagcatccgggaagcctttacgcccaccaccctcccacagtcagaaagtatccagattccttgcttttatctcctactgattctgaccattccgcttttcatcctgtttgaccggtggatgagaaaactgtatttcaaacatcacactcctaagcttccagagttctgaacgaaaaacggggatgtcttttagtggaagacatccccgtttcagtttatatcaattcatttagtccagtttatgaatcaccagtcccgaacgcaacttcggctcaaaccaagttgtcttgggaggcatgatgttgcccgtatcggcgatgtccatcagctgcttcatggaaacgggatagagggccaatgccactttcatctcaccactgtccacccgcttcttcaactctcccagaccacggatgccgcctacaaagtcaatacgcttgtcggaacggaggtctttgatgccgagcacttcatccagtatcagattggaggagatggttacatccagtactccaatggggtcgttatcattataagtacccggtttggcagtaaggctgtaccactttccgtccagatagagggagaagttatgcagttcggacggcttatagatgtcctcacctttctcctccacgatgaaattcttgcccacagcagccagaaactcttcgggagtcatgccgttcaagtccttcaccacccggttatagtcaataatagtcaactggttggcagggaagcacacagccatgaagtagttgtactcttcgtcaccacggtgattgggattttgcttggctttctccgcacccaccaaagcggcagcggcactgcgatgatgcccatcggcaatgtagagagcgggcatttgggcaaactcttgggtaatggcatcaatgtcctcctgcttgtctataatccagaaggtatggccgaaaccgtcacccggagcgataaagtcgtataccggtttccccgctgtataacgggaaatgacggcatccagtgcagcgttatcgggataggcaaagaatacgggctcaatgttggcattgttcacgcggacatgcttcatacggtcctcctctttatcacgacgagtcaactcgtgcttcttgatgacaccgttcatataatcgggaacataggcaccgacaacaagaccgtactgtgtcttgccgttcatggtctgggcatagacgtaatagttttctttatcgtcctgcaccagccagcctttctcctggaacatacggaagttctctgcagctttctgataaacacgttcgtcatgctcatccgtaccgacgggaaaatctatttccggcttgataatatgatatagggatttttcattaccttccgcttctgcacgtgcttctgcagaattcaatacgtcgtaaggacgggacgctacttgttccaccaaatcctgagggggacgaatccctttaaagggtttaattatagccataagagagtgttttatatggattattgaggtttctttttcacgaaatatcttaccagataaattgcactacctaatatcagtacaatagatacgccctcgcaaaaaccgagggcgaaatctgacaattcatttctgaatatactacttaatgaaaatataccagcacctattgctaaataaagaactgaacatttataggtagtcttactattcatctcatttcctgtttacgcggaacttctcgcaaccgtctttcaggaagcctacaatctgcttggcagcggcaatacctgcgttgatattggcttcggcagtctgggcccccatctttttcggtgtagaaaaataacgtccggcaaacttggctgcaaatgtttcattggcagcaggcataatgtcggtcatgtatttcaagtcggtgcgctcttccatcagctggataagctctgcttcattgatgacttccttacgggctgtgttcaccagcagtccgcccttcggcatcttgttcaccaatgcataattgatggaattcttcgtttcggcagttgcaggaatatgcagggaaacgacatcgcaagtagagtaaagctcttcggcagaacccacagccttcactccatccttctcgattacttctttcgggcagaaagcgtcgaacgcataaatctccataccgaagcctttggcaatacgggctacgttgcgccccacgttaccataagcgtggatacccagtttcttgcccatcagttcagtaccggaagtaccgttatacatattacggacagccatcaccatcaagccgaaagccaactcggccacagcattggagttctgtcccggagtattcattacacatacattgtgggcagtagctgcttccaggtccacattgtcataaccggcaccggcacgcaccacaatcttcagttccttggcggcatccagcacttcagcatcaatgatgtcactgcggataatgatagcgttggcatctttcacagcctccaacagcttggctttttcaccatatttttccagcaacacgagttcgtaacctgctgcttctatttctttacggataccgtctactgccactttggcaaacggtttgtctgttgcaactaatactttcataatttcatgatattaaaaagactcaccacagatgacacagattatcacagagtttaatcataaaaacaatctgtgcaaatctgcgtaatctgtggtgaaaaacaatattattaatgaagtttctcaaattcctgcatgcagtcaatcaaagcctgcacgctttccttcggcatggcattatagcaggatgcacggaatccacctacagaacggtgtcccttgatacctaccatacctctttcggtagcgaacttcaagaagtcagcttccaattccttgtattcgggagccatcacaaagcagatgttcatgcgtgaacggtcttctttggcagccgtacccacaaacattttgttacggtcaatttcagcatacagcatatcggccttttcgatggcacggcgttccatttccttcacgccaccctctgccttaatccagcgcaatgtctgcagggctgcatagatggggacaacgggaggagtattgaacatagagccgctatccacatgcgtctgatagttcagcatggtcgggatatagcgggataccttacccagcgcgtcattcttcacgatgacgaatgtaacaccggaaggagccagattcttctgcgcaccaccatagatacagatatatttggatacgtcgatgggacgggagaaaatatcagaagacatatcggccaccatcggaacgtttacgtccaaatcctctttcagttccgtaccgtagattgtattgttggtagtgatgtggaaatagtctgcatcagcaggcactgtatagtccttcggaatataagtataagtagattcagcggaagaagcgacttcaactacttcaccgaatgccttagcttctttcatggctttcttggcccatacacccgtattcaggtaagcagctttcttttcaaggaagttgaagggtaccatgcagaattccaaactggcaccaccgcccaagaacagtaccgaatatccttcggggatattgagcaattctttgaataatgccacagcttcgtccacaacgggttggaagtctttggcacggtggctgatttccatcagtgagaggcctgagccattgaaatcaagaatagcttgtgccgtattctcaatcacctcacgaggaaggatagaaggtcctgcattgaaattatgctttttcatttgaagtttgttttggttatacaatttcgttcattaatgtctttcgactttgcgaaattacggaaatatttcttcaaaacaaacctttcctgatgaaattctatttttaggccgcatttagcttactttttaatggtttatacaagatatatacaccattttgttatccttacttatcaagaataatacttttagagaaactaaaagcaaggcggtttcattacttcatattcaaaagaataagcgcaaataaaatgaatatttataagataaatcactttgcttcctcgataacagttttcattcccttgattttttcaccgcgtaccagcgtcagcaattgtttcattttactgcggcgcacggctacaaaggcatagtgttcctttacgtccacctgcccgacatcttcacgcgccattcctccttttttatacaagaagccgacaatatctatcttgttcaacttatcctttttccctttacctatatataaggtagcccatcggggcttggccggtttgggaagcgtctccggaaactcgtacgtttcgatgtcttcagaaatgtactcgggtacccgctcctcggcatgcaggacaagatatgcatttcccgatgcctcccaacgggcagtacgtccattacggtgcgtataggcttcctcgtttacgggaggatggtaatgcaccacattctcaatacccggaatatctagtccgcgggcggcaaggtctgtggatatcagtacagcgcaactgccgttgcggaacttgtaaagcgcacgttcgcggtcgggctgctccatacctccatgaaacatgtcgcaagggaacttcctggctttcaggtacccggcaacacgctccacgctttcacgataattgcagaataccaaggtggaatgacaaccgagggtacaaagcaggttatagagggtttccagtttgtccttctccggagaaacaaccttgtgcagccgcagacgcggagcaagagcttccggagtaagaaaatcaagcttcatgagccgggagccggaagacggggaatcacctcctactccggcaaattgcggtatttcctctgcatcggtggccgagagaagcacacgctttttcagtgagggaagctgcccgataacctctgccatctcgtcatggaagccgaactcaagacacttgtcgaattcatctatcaccagagtgacgacagtggcggcattgaaattttctttcctcaaatggtcgctcatacgtcccggagtaccgataatgacggtgggatgaatgcctttcattgtccggtgttcttccatggcagggcgtccgccatagcagctcatagctttgaaaggagttcccatagacttgaacacagtttctatctgcaaagccaattcgcgtgaaggtactagtacaagagcctgcacaccttgtatatccgctttcaaggtctgtaccagcggaaggagaaaagccagtgtcttacccgaaccggtgggcgaaagaagtactaaatctttagctgattgataggcttccttagcagcctcctgcatcggcgtaagttcttgtatcttcaaattatgaagtatatccgaaagttccatgaatatctcttttttaatcaatatgcaaagatacggataagaagtcagtttccatcaaaacaaaaacagcttttaagaaagctacctaaaatcatgacatgcccgtcaatcgaataggagaaaattaaagtcgttttctcccactttaattttggggaagtaaagatattgaggttgtcaaggacgtgctcaatcaacctgtttcttcaggtagattgagcacgtccttgacaaaatcaccgttttcttttgacaaatacatttttataccaaagatataataaaaattgtaattgatatgtaacggtaatctgaaagttattgtttaaatttgcaacgttttttaatagtttaatcatattaattaaaatctcatggcaaaaagaatgcgattcattctttccacaattatggtgatagtcgcaatgacagctaaggctcaggtgactacctcctcattaagtggaaaggtaacagacccagacaaggaagccattatcggtgcaacagttcaggctatacacgagccttccgggacacgatatggcgcaattacaaacatcgatggtcgttataccattcaaggtatgcgggcaggcgggccttacagtgtggaagtctcttacatcggctaccaaacaatgatgtacaaggatgtgactcttcaattaggtgaagtctacaatttgaatgtacagatgaaagaatcatcagagcttcttgaggaagtagttgttacagctcaaaagactaaatttgcttccgaaaagaccggagcaacaaccaacatttccaatacacagattgccagcatgccttctgtaagccgtagcattaccgactattctcgtttgtctgcttacggtggtaatgggatgtcgtttgccggatctgacggtcgtacagccaacttcacaatcgacggtgccaacttcaacaacaacttcggtttgagttccaacctgcctggtggcggtaatccggtctctatagaggcgattgacgaaattcagattgtcatatctccgtttgatgtacgccagaccaacttcatcggtggcggtatcaatgccattaccaaatcaggtaccaatacttacaaaggtacagcttatatttatcaccagaatgaaaacatgcgcggtgatgccattgatcgtgaaacaatcttaggtgcccgcgagaaagaccagtcaactacatatggttttactattggcggtccgataatcaagaacaagctcttcttctttgcaaacggcgagctgcagaatactcctgcaattgccaatcgctggcgtgcttccgaagacggtgtggccaatgcagatgcatacatctcacgtgcaaccgttgccgaccttcagaaagtgtccgatatagcaaaagaaagatatggctataacacaggctcattcagcagcttcccgtccgacaataagaatactaaattattggcacgtatagactggaacatcaacaacaaccatcgcttggctttgcgttataactataccaagaataccgtatggaatgcccctaacgcttcctctatggatggtggtactcgtatgtcgggtagtcgtacttcacagtatgccatgtcgtatgccaactccatgtattccttggataacttggtacattcattgtctttcgaccttaacagccgcttctctgctaccttgtccaaccagtttttggcaacattctccaagttggatgacgtacgtggtactaattccagtattttcccatttgtcgatattttgaaagacaatcaaaactacatctcttttggtgaagaacttttcacttacaataacgcagtccacaacacagtgtggaatataaaggatgacgtaacttactataccggcaatcataaaatcatggttggcttgaactatgagcatcaaatggccgacaaccagtatctccgtaacggtacaggatattatcgctataccagcctggatgactttgttcaaggagctgctccggaaattgtatgtttgacttatggctataacggtgaaaacgaacctgcatcacgtgttcagtacaataaattgggcttctacttgcaagacgaatggaacgtacgttccgatttcaaggttacagccggtctgcgcttcgacggactcttctttgataatggtgacttgatgaccaacaatgccattcttgaccttgactacaacggtcgtcatatcgataccggcaaatggcccggaaactcattgacagtatctcctcgtataggtttcagttgggatatacttggcaacaatactttgaagctgcgtggtggtagcggtttgttctccggacgtctgcctttggtattctttaccaatatgcctaccaatggcggtatgattcaatatcaggcgcaagtcaatgccaagaatgcaaaagacaaaggtttcactatggatgaattcaaaggtggaatcctttccacagaagctctgaaacaaaagctttatgatttgggttatcctcagacaatcaaaccggaagacggtacagttccttcaagcatttgcggcgtcgatcccgactttaaaatgccacaggtctggaagtcttcaattgccgtggattatacagtacccgtatcattcccattgaacgtgacggtagaaggaatctataacaagacacttaatgccgccatgctgaaagactggagccagaaagatataaacggctttacacgcttcaatggtgctgacaaccgtcctgtattcccgtctgacgctacttatacggacgaggccggcaagagtctgcccagtgcttacatgcttgagaatacaagccgcggttacggatggtcgaccagcgttaccgtgaacgcagcgcctgccaaatggattaatttgatggctgcttatacgcatacagtatctaaggaggtgacttcacttccgggttccaatgcttcttcagtactcaactacctttctacatacgaaggtgtcaacaacttccgtttgcacaatggccttaacgttactcccgaccgtttcattgcaagtgccactatcaacgacaagagcggcaaccactttagtttgatttacgagacttggcgtggcggttacaattactcttacatgcttgccaacgacataaacggtgacggttacaactacgatgccatttatatccctacagacaagcaagttgccgacggttcattccgtttcgttagcgaggatgacaagacacgcttcatggattatgtacacaacgactcataccttaagaataatcagggtaaatatgctgagcccaacagtctttattctccttgggtacaccgtgtagatttctcttataagcacgatttcaacttgaatgtatgtggtgccaagcacaaattgcagctgagctttgacatgaagaacgtgcttaatttcttcaattcaagctggggagtaagtaagcatttgaatcctgctatcggtaacgaagcccgtatcttgaagtatgaaggtgtagacgctgaaggttttgctacattctcaactccggagtctataaatggcaacaccaagacttggactctcaaccatgctattggtcagtgctggtatgcttctatcggtattaagtattgctttaactgattatcaatttaaatataatcgaagaatatgaaaaaatatctatttatagtacttgctgctgtgatttcccttttctcaagctgtgctgaagatgatgcagcaataggcttgtcaggattgaaggtttcacagtcgtacgttgcgctgccggttgaaggaggtagcactgacattacaattgaatcgaagtccgaatggattatcacaggtaacgacaaggccgattggcttaccatctctacaactcaaggtcctcaaggcgaaagcaaaatcacattctctgctgatgaagctgtggatggccgttcagtggaactgaagctgagcagcgccaatgaaactcagaacttgactatcatgcaaggcttgccagtcatttcggaagctacttgtgccgaggtaatagccggtcccgacaagaagacttataaagtgaccggtgttgtttcaaatatttccaacaccgtttacggcaactgggacattgtggatgccaccggtaaggtttacgtctatggaactttggacgccaaaggcaatacgaagaattttgccagcctgggtctggaagaaggcgatgaggtaacaatacaaggtcccaaaaccacctacggtactacagttgagcttgttgatgttactgtgctcaagattaacaaatcgctcatcaaggtcgactctgtctacaatgatgtacttccggttgagggtggtatctttgaggcatatatcataaccaaaggcaacggcgtttctgtagaaattcctgaggatgccaaagaatggttgtctattgtctctatcgaccagaaaggaacagatgcttgcgtgaagttccgggctgcccgaaacgaaggtggtgaccgttcaaccagcattacattccgcactactgacggtaaaaaagattacacaagcaagactgaactctcacagcagggcgccatcgttgaagctactgttgctgaattcattgccgccgaggttggtgctacacaataccgcattagtggtgtagtgaccaagattgctaatacccaatatggcaatatctacatcaaggatttctcgggtgatgtatatatctatggcatcaaagattttgctgattctaatatcaaggaaggtgatattgtaactctcgttggtccacgtgccgaatacaaaggtactccgcagatgaccaatgccgttgcagaggacgtgaagagtgtaaaaacagttactgttgctgatttccttgcagcagaggaaagcccttcacaatattaccagttgaccggtactgtatcaaatatcgcaagtaccctttatggtaattttgatattacagatgaaagcggcaaggtatatgtttatggtcttcttacaggctggaaaggcgcaagcaaacagttcgaatcactgggtattgttgaaggtgataagattactatatgcggtgttcgtaccagctacaaagattccgatcaagtgggaagcgcattcttcatttctaaagtgactgaataaagaattttttataataaagtaaaatccgcactgccatcacagtatatgtagatgacattgcggatttctttttcaattttatatatgatatgaataaaagatattacaatttgattttagcgatttgcctgttgctgccattgttctgtggatgtagctcagatgattcttcagaaatgaatgaacatcccactatcaatgacattcaattcactgaacaaggttccaagcgtgaagtactatatgctattgatggtagcaaaggcttgacattggatgaatcaatccgttcgcaaatcagtattgcagccaataagactatttccggtgacggattcaccttttcagaagaatttgatactgataatctatcgtcacttcccgattactccaccgtaaagcaatggagtgacaaggctgtggccaaagcaaaaacttcttattgggtacgctatcagcttccttcacaagttgccatgttcaaacttcgcatcgcatacgttgatgggataaatgtaggagtggagcataatgcagcccaaaaaattgtgatagaaaacaaaaatgcgaatgtatccgcccaaggacaaaattacgtgacagaatacgaaatgccacatctgatggagggtaatacctacgtggagcatgaagttacggccggtggcaacaaggtgcttaactatgcaatggaatggaacgaccacatgaaacattctcgctgggtggcctatagctacgatgccattacgggggtgaaaaatgtaaccagaagtgatgacgcctgggcagtagacccattgctgccggagagtatgagggttgacaatagctggcataccaatgacggattcgaccgaggacacctctgtgcttccgatgaccgttctttttctacagaagccaataagcagactttctacttcagcaacatgagtccacaactcaactcattcaatggcggttactgggttaccttcgagcagttactcaattcatgggtgcgcaaggacaatgcctttggaagtgtgtacgataaaatctatgtggcaaaaggtggaacgctcgacaagctattgatagattataagggaaccaaggcaggaggagatggagtgatgcccgctactgactcaaatggtttcacatcaaaaggattgcctgttccacaatattacttcattgccgtattggctcatcgtgccaatcagcttgttgacatagctacatcctatcaggccataggtttttgggtggaacatcgtgatgactacggctatacttttgaacatccgctgaatagggatgacaccaaagcaaatgccatcagtattgatgaacttgaaagcaagacaggcatagacttcttctgcaatcttcccgattatattgaggatgaagtggagagtagctataatgtcaccgattgggcctggtagtatcatgtgctacgaatgaatattcgtgaatccggacatgaataatggtatattacacactccctaagtgacgagtagataataagaagagagagggaggtttgccttatggctgacctccctctctcctatttgttctttgaaatactcaaatcagtcattcatgagctttctataacgtacacgggtgggttcttctttcccaagacgtttctgtttattttcctcatattctgaataagaaccttcaaagaagaacacattggagtctccttcgaaagcgaggatatgcgtacagatacggtcaaggaaccaacggtcgtgactgatgaccacagcacatccggcaaagtcctccaaaccttcttcgagggcacggagcgtattcacgtcgatgtcattggtgggctcgtccagcaacagcacattaccttcctccttcaagcagagcgccagatgcaagcggttgcgttcaccaccggaaagcaccccacagagcttttcctggtcggcaccggagaagttgaaacgggacagataggcgcgtgcattaatgtcgcgccctcccatgcgaatcagatcgtttccgccggaaatgacctgatatacgctcttgttggggtcgatatccttatgctgctggtccacgtaggcaacctttacggtctcccccacctcgaattcgcctttgtctgccttttccagtcccatgataagacggaaaagcgtagttttaccggcaccattagggccgatgatacccacgataccgttgggtggaagcatgaagttgaggtcatcgaacaacagtttgtcaccgaacgcctttgccacatgcttggcttcaatcaccttattacccagacggggaccgttcgggataaagatttccagcttctcttccttctccttcacatcctcgttcagcaatttgtcgtaggagttcagacgcgccttcccctttgcctgacgggccttgggagccatgcgcacccactccagctcgcgttccagcgtcttgcggcgcttgctggcggtcttttcctcttgctccatgcgcttggtcttctgttccagccaactggagtagttacctttccagggaataccttcgccacggtccagctcaagaatccagccggcaacgtggtcgaggaagtaacggtcgtgcgttacggcaatcaccgtaccctcgtactgctgcaagtgttgttccagccagtcgatggattcggcatcaaggtggttggtgggctcgtcaagaagaagcacgtcgggcttctgcaacaataggcggcaaagggccacacggcgacgctcaccaccggaaagatgttctacggactggtcttcgggcggacaacggagggcgtccatggcgcgttccagcttgctgtcaaggttccaggcatcggtcgcgtcaatgatgtcctgcaactcggcctggcgggagaagagcttgtccatcttgtcctggtcctcataatattcgggcaagccaaacttctgattgatttcctcgtattctgccagcgcgtccacaatgggctgcacgccttccattacaatttcctttacggtcttggtggggtcgaggtacggttcctgggccagataccccacagaatatcccggcgagaacaccacttcgccctgataggacttatccaatccggcgataatcttcagcagggtcgatttacccgaaccgttcagaccgatgataccgatttttgccccgtagaagaacgagaggtaaatgttcttcagtacctgcttgttgttctgctgaatggttttattcagcccaaccatagaaaagataatctttttatcgtctactgttgccatgtatttaatgattaatgttcagtgataatgattaatatcaaggattgatggggacaaagataagaaaaaagatgatattattttgcaaatttcaaaaaagtatctatctttgcacccgcttaacagcaatgaaggattgaatcgctagctcagcaggtagagcacaacacttttaatgttggggtcttgggttcgagccccaagcggttcacatagaaacaaagccagaaggcgacaaaaagaaaaaagtcctacaatatcaatgtattgtgggactttttttatgtttccatcttacctgaaagtcccaaaaggggggtacgaaaagaaaagttggacatccaaacagtggtacaattggtacagtgggtacagcgcctcttctgcttcacacacatgcgcttatgtacattacttcataacgcgtacattatttatatacatgcgtgtgtgagatagaagagacgctgtacccactgtaccaactgtacccataaacctcacctttacgccgctcaagttcacctttacacggcccaacctcacctttgcttatgtcacttcacctcttccagataaagcacacggctcgaatagtcgttctgcttgtgatagtccaccttatggttgtagggaatctccagcccgtttgccatgaggtaggcaccactgaaactctttccttcgtagttcaagggaacattatctatacggttcagttcatgcacccggtattgcttgtcggcacagagccctgccatcttcacacgcggcaggtgctggttacagaaatgttccgtcttccaccaatagaagactgccttgtccttctccggagccacgtacatcagagaagccacaccttgcttgtcataaggagagagcaggcggtaaatgtctcccaactgtactacgggacgaatggtcttgtactcggcaatggcattcttgcaaagagccttttcttcttccgtcatatttttgggctggatttccatacccaaacgaccactcatggcaacgtctatccgatatttcagagggatggtgcggaacgtctgatgattgggggcagcactgatatgcgatgccatagcgatggcggggaagaaataggaagttccccactgcatatagacacgttgcagggcatcggtattgtcgcttacccagaactcgtcgaagtaaggcagcactccgtagttggcacgaccgccgccactggcacatgcctggatggtaaggtcgggatatttggcacggatgcgctggcagattttctcgaagccgcggtggaattcgatgtacatgtggctctgattatccttcgtcagatattgcgaaccgtggttctggacagacatattggcgtcccacttgatgtaatctatttcaggataagaggtcatcaggttgtctaccacaccgaaaacgaagtcctgcacggcaggattggcaaggtcaagcactacctgcgtgccgccgcgtcccaacacaacgtcacgttcggaagctttaagtacccagtcgggatgcttctcgtagagttcgctggtagtgttcgccatctccggctcaatccagatgccaaacttgacgccatgtttcttggcatcactcagcaagccttcaataccgttcggaagcttgttcttgtccaccacccagtcgccgagtgatgagctgtcgttcttacggggatacttgtcgccaaaccagccatcgtccatcacgaacaactcgccacccatggaggcaatgtccgccatcatttggtccataccttgctggttgatgtcaaagtacacgccttcccaactattcaaaagaatcttgcggggggtagtgccgtgcgccagtttgtgcaggcgtgcccagcgatggaagttacggctgccgccactcaagccttcattactataagtcagggcaagttcgggagtgcggaaaagctcgtccttcttcaaggaataagtagagttctcttcgttgattccggcaaagaaatggtggtattcatcatcgtgtgtctcaatgcggagtttgtagttgccgctgtaacagagggctgcaccaatcacgttgcccgtgttctcctgcggacggccgtcaagggagaacatcacttcggcatggtcagtatgggaattgcgcacaccgtccttattcttgataaccttcatgcccggagtgagaggttcctgcgtcaagaccccttcattggcccaggaaccggagagatgggacagccatacatcgccacggcggatgggcagatagccggaagcaaactgattgagcaccaccggcttcttctcctgatgggagatttctgtccaggattctatcacgtcagcatcctgccaggcacggtaacagacgttgacgaagaagggatacaccttatccttcagtgccacgacagtcgtcacggcattcccttccttttcggtagtcacgttcaatacttcgagctggagggtcatgttaccgtcggcatgcttcacagcgagggccgtctccacgggagcattcaatccatattcgggataggctgcatagttcgcttctgccgcagagacattctgcaagtcggcttcagaaagtctgttaccataatacaagtgtctcagtgtaccgccttcaggagccgaaagcaccaaagaggttttcggagtggatacacatacgttttgagccaacaaactgccggtcagcagcagtgctccaaagagaaaatttgttcgtttcttgaaattcatgcttttcttgtttagattctatattcatttagctgtgcgcaaatataggcgtttcctcgaagataaaatagtatcattttatcatatccttatacaaattctatttccggctgacaattgtccccgtggcttggttggcaggcatcaccagcacttccgcaatctggatatgctcggggacggcagcggcgaaatagaccacttcggctatatcgtcgccggtcagcgggcgtatacctttatatacattatcggccgcctcccggttaccacggaaacggacgacggagaaattggtttccaccaaccccggcttgatattcgttacgcgtaccggggtatccaccaggtcgatgcggagtccgtcggaaagggccttgacggcagccttgcaggcacagtacacactgcctcccggataagcgtaatctccggcaatggaccccatattgataacgtgaccacggccgcgctccaccataccgggaaccacgaggcgggtcatggcaagcaaggctttcacgttagtgtcgatgacaatgtcccattcatccaggttaccttcatgttccttgtccaccccaatgacgagtccggcattgttcaccagtatgtctaccgccttccattcctccggaagggattcgagggcggcacgggcagcctgccggtcgcggacatcgaaaggaagcagatacacatcggctccatatttctccaacaattctttctttacagcattcagtttctccacattacggccattgagtataagccggtaaccgttcatggcaaatttacgcgcgcagccttcccctattcccgaggaggctccggtgatgagtacaatcttcttttccatcatgttattaagttttaatatcaatactgccaacaaaggtattacttattattttaacttcataggaataatgaattttagagtaaggcgaaaaatcccgataaattatgtaactttgcacccgctttttgaaagcccgagaaactgttttaattttatttcagctttcttctgagatttgtttaattcgtttggataaagtaaaagacgcttatgcaaaagtccgattgcatcatcggtgtggagcacgtatcgaaatttttcggagataaggccgtgctgaatgatgtgaatttgtctgtccgtaagggcgagtttgtaacaatactgggaccgtccggctgcggaaagacaactctgttgcgcctcattgcaggctttcagacagcctcggaaggagtgataaccattgccggaaaggacatcacgcagacaccgccgcacaagcgtccggtgaacaccgtgttccagaagtacgccctcttcccccacctcaacgtgttcaacaacattgctttcgggttgaagctgaagaagctgcccggtgccaccatcgagaagaaggtaaagcaagccctgcgcatggtgggcatgacggactatgaggaccgcgacgtagactccctctccggcgggcagcaacagcgcgtagccattgcccgagccatcgtcaacgaacccgaagtgctgctactggacgaaccccttgccgccctggacctaaaaatgcgcaaggacatgcagatggagctaaaggagatgcaccagaagctgggcatcaccttcgtatatgtgacccacgaccaggaagaggcactgaccttgagcgataccatcgtcgtgatgagcgaaggacgcatccagcaaataggcgtgccgacggacatctacaacgaacccatcaactccttcgtagcagacttcattggtgaaagcaacatcttgaacggagttatgataaaggataaagccgtcaccttctgcggacacgaatttgaatgcgtggacacgggatttggcgagcagatgcaggtagacgtagtgattcgccccgaagacatctacatcttcgatgtatccgacgccgcacagctgacggggaccgtaaccagctgcatctttaaaggcgtacactacgaaatgctggtgcagacgcgcgaaggctacgagctgatggtgcaggactaccatgccttcgaggcaggacgcgaagtcggcctgctggtgaaacccttcgacatccacgtgatgaagaaggaacgcacctgcaacaccttcgagggaaagctggtggacgagacgcacgtagacttcctgggctgtaacttcgagtgcctccccgtgcagggcatcgagccgggcagcgccgtgcaagtggaagtagacttccagcacgtcatcctcgaagacaacgaagaggacggccgactgacgggtgaagtgaaattcatactctacaaagggaaccattaccacttgaccgtgtttacggactgggacgaagacatctttgtcgacaccaacgacgtgtgggacgacggcgaccgcgtaggtatcaccatcgcccctcaaaatatacggattgttcaatctcttaataaggaaggaagtgctcaataagttatcccatttcttcatgcgccggcgcaactggacggtaccctacgcgctgtttctgcttgtatttgtcatagtaccgctactgctcatcgtgctctatacctttacggacgaagggggagcgtttacgctggccaacttccgcaagttcatgatgcaccccgaagcgatgaacacgtttgtctactccatcggaatagccgttatcaccacgctggtctgcctgctgctgggctatccggcagcgtatatcctgagccagaagcaattcaacacctcacgcaccatggtggtgctgttcatcctccccatgtgggtgaatatcttgatacgtacgcttgccacagtggcgctgttcgacttcctgaacctgccgctgggcgaaggtgcccttgtgttcggtatggtctacaacttcctgccgttcatgatataccccatttacaacactcttcagaagatggaccacaatctgattgaggctgcgcaggacttgggagcctctcctacccgcgtattcggcaaggtgattctgccgctctccatgccgggagtgatgagcggcatagtgatggtgtttatgcctacggtttctacctttgccattgccgagttgctgacaatgaacaacatcaaactgttcggcaccacggtgcaagagaatatttacaacggaatgtggaactacggtgccgccctctcgctcatcatgctgctgctgataggcatcaccatcctctttaccaacgaggaggacggggcatcgaatgaaagcggaggtgtgatatgatgacacgaatcttaacccgcggctacttgtggctgctgctggcgttgctctactcgcccatcttaattattatgatattctccttcacggaggcaaaggtgctgggcaactggacgggattctccaccaagctgtacagctccttgtttacgggcgggatgcaccactcgctgataaatgccatctggaacacattcgccattgccctgcttgccgccaccgccagtacggcgctgggcagcattgcagccatcggcatcttcaatctgcgctcgcgcacacggcaggtaatgaacttcgccaatgccatcccgatgatgaatgcagacattatcaccggtgtgtcgctgttcctgctgttcgtcagcttcggcatatcgcaaggattcaccacagtggtactggcacacatcactttctgcacgccctacgtggtgctcagcgtaatgccccggctcaaaaagatgaaccagaatgtctacgaggcggcactcgacctgggcgccacaccgttccaagcactgcgcaaggttattcttccggagatatttccgggtatgataagcggattcatccttgctttcacgctctccatcgacgactttgccgtgaccatcttcaccatcggcaaccaggggctggaaacgctctccacctacatctacgccgatgcgcgcaaaggtggactgacgccggaactgcggccactctccaccatcatcttcgtgacggtgctggtgctgctgattgtaatcaacaagcgggccgaacggacgaaaaacgattgatgtgagtgatgagttataagttatcaattgtcaagaacaagatgatgaaaaggataataaacatactgattctactgtgctgtatcgcatccctctcttcttgtggaaactccacagaagagcgcagccgtgtactgaagatatacaactgggcggactacatcgatgaagatgtgcttgccgaatttcccgactggtacaagcagcagacgggcgaagacctccgtatcatctaccaggtgttcgatatcaacgaaatcatgctcaccaaaattgagcgcgggcacgaggacttcgacgtcgtatgcccctcggagtacatcatcgaacgcatgcttcgcaaagacctcctgctacccatcgaccgcaacttcggtcacacgccggactacatccccaacgtgtcgccctacattcgccacgagctgaacaagacctcgcaaccggaacgccagaccgaggactatgccgtgccctacatgtggggcaccgctggtatcctcttcaacaaaaagtttattaccgccgaagaggccgacacatgggacatcctctgggactccaaaaaccgcggcaaaatactgatgaaggacagctaccgcgatgcctacggtaccgccatcatctacgcccacgcccgggagctggccgacagcaccgtcaccgtagagcaactgatgaacgacaactccccgcaggccatcgccctggccgagcaacgcctcaaggagatgaaacccaacatcgccggctgggaagccgacttcggcaaggaaatgatgaccaagaacaaggcgtggattaacttcacctggagcggcgacgccgtctgggccatcgaggaggccgatgccgtgggtgtggaactggactacaccgtcccctgcgaaggcagcaacatctggtacgacggctgggtaatcccccgctacgcccgcaacgtgaaggcggcaagctatttcatcaactacctctgccagccttccgtggcactgcgcaacatggatgccatcggctacgtcagcgccgtagccacaccggaaatcatggaggccaagaccgataccacgctcgacgtgcactccgacctcagctacttcttcggccccctgcccggagccgacagcctgcagatagacccggtacaatatcctgaccgccgagtagtggaacgctgcgccatgatacgcgacttcggcgaccgcacggaactagtgctcgagatgtggagccgcgtgaaaggtgacaatctcaacacaggcatcgtgctgctcatcttcgccgttttcggtctgctcttcatctggctggtatatgccaagatacgaaagtacaagcagaaacgccgccaccgtctccgcagaaagcggaaaaggggatgagcaacacattgtttacctaaaaacccgtcaacgtgcaaggaacaaagaatctgacacaaggccccatcaaccgccagcttttcacgctggcaatgcccatcatggccacctcgttcatccagatggcctacagcctgacggacatggcatgggtagggcgtctgggcagtgagtccatggctgcagtaggtgcggtaggcatactgacgtggatgtccggctccatcgccttgctcaataaagtgggcgccgaagtcagcgtaggccagtccatcggtgcacgcagcgaagaggacgcacgcagctttgcctcgcacaacattacgattgccctgctcatctccgtctgctggggaggcctgctctttcttttcgcccgccccatcctgaacatcttcgagctgaaacagcatatcacggacgccgccgtgacttatctgcgcatcgtgtcgacgggactgcctttcatatttctctccgctgcctttacgggcatctataacgcggcaggacgaagcaagattccgttctacatcagcgggacgggactgataatgaacatcgtcctcgaccctctgttcatcttcggcttcggttggggaacagtgggcgcggcacttgccacatggctttccgaagctacagtattcggcatcttcgtctacaaactccgggggaaaagcgccgtgctcggaggtttctcctttatcgttccgctgaaaaagaagtacacccggcgcatcttcaagctcgggctgcccgtggctacgctgaacacgctatttgccttcgtcaatatgttcctctcgcgcaccgcctcggagcagggaggacacatcggactgatggcattcaccaccggtggacaaatcgaggccatcacctggaatacttcgcaaggattctccacggggctgagcacgttcatcgcccagaactatgccgcggggcagaagtcgcgcgtgaagcaagcatggcgcaccaccatgtggatgacgggcgtattcggaagcctctgctcactactgttcatcttcttcggcagcgaggtgttctctatcttcgtacccgaggccgaagcctaccgtgtgggtggagatttcctccgcatcgacggctattcgcaaatgttcatgatgatggaaattaccatgcagggcgtgttctacggactgggacggacagtgccgcctgccattgtcagcatcggatgcaattacatgcgtattccggtggcgttattgctggtgcacatgggtatgggagtggatgccatctggtgggcagtaagtggaacgaccgttgccaaaggtcttatactgacagcctggttcgtcctcatcaaaaggaaaattctctaaaaaaggacagaactggcgaactttagaaagaagaatatggttattatatacataaatttgcaacattaaagataaagtcaacttttaaagaaaaagagttatgaagaagatgaaatttacagtattacttttgtgcggcgcattgctgctgggcagttgcggcacaatgaacaacaaggccaaaggtggaataatcggcggtggctccggtgcagcagcaggtgccattatcggcggactgataggtaaaggcaagggggcagccattggagctgcggtaggtgctgcagtaggtacgggtgccggcgttgccatcggacacaagatggacaagaaggctgccgaagctgccaagattgaaggcgcccaagtggagcaggtgacggatgcaaacggcttgccggctgtcaaagtatcctttgcggcaggtattcttttcggcttcaactccgcagcactgagcaacgaggcaaaggcttccctgcgcgaactcgcacagattctgaaggaagacccgacaaccgatatcgccatcatcggccataccgacaaagtgggtacttacgaagccaacatgaaagtttccaagaaccgcgcctatgccgtagagaactatttgcaggattgcggcgtatctccggcccagttcaagaaagtggaaggcgtgggatacaacgaatacgacgaaagtctgtctgccgaccagaaccgacgcgtagaggtatatatgtatgccagcgaacagatgattaagaatgcggaggcagctaattaatatggtaaagtgattaatgtgttaatgtgccaatatgcatattggcacattaacacattaatcacattggcactttctccatgaaactcccgaagcctttgcggttcctccgcaacatcatattattcttctttatttccactatcctagcggtagtggcttatcgttttgtacccgtctacatcacgccactgatggttattcgcagcgtgcaacaggtctttaagggtgaaagtccatgctggcaccacacttgggtatcttccgacaagatatcccctcacctgcctatggccgtcattgcctcggaagacaaccggtttgccacacacaacggattcgatttcatcgagatacagaaagcgataaaggagaatgaaacaagaaaacggaaacggggcgcaagcaccatcagccagcagacggcaaagaatgtattcctatggccccagtcttcctgggtacgtaaaggactggaagtctacttcaccgtactaatagagttcttctggtccaaagaacgtatcatggaggtctatctcaactccatcgaaatgggaaaaggcatctatggcgcacaagctgccgccaaatacaagttcaagactacagcagccaagctctctgccggacagtgcgcactaatagcggcaacattgcccaaccccatacgcttcgactcagcacacccctccccttacataaagaaaaggcaaggacagattctacgattgatgaaactggtacccaaattccagctaaatgagaagcggacaaaagaataagaagaggatgtatcaaaacagttaatagcacacagatgacacatcctcctttaatttttaattcttaatttttaattaatacgcgtgtcctccctcttccatctccttcgcatcaatcttgcgattgtcgatactgcgccaagcgtagaagatgtaggcaagaacgaaaggaacaaggatagagacataagccataaccttcagtgtgaactggctcgagcaactgtttgccaacgtgagtgagctttgcaggtcgtgggtagaaggataataggccgtattgttatagcctgccacaagcagcagtgccaataccgtaagcaccgtccctgcaccggcaaaccagatacccttgtcgaatgccggcttccacagcgtgcggataatgccccagagcacagccaccacaccaaccaggaatacaagcagcactaccggcatctgcaggaagttcgtcagatacttgtagggctccatgaacacctctcccgtttccgggcgtacagcatagccgtcggcaagcagcgtgcggatgacgaaggccaggaagaataccaggaacaacgccgtatttccccagagtgcccggcggcagcgtttcaccaaatcatcctcattgatattattaataaaataaagcgctcccaagatacgtgccaggaagaacacagccagccccagcaccacattccacggattaagcaacgcatccaaaccatgccagccgttagcccattggctgataaccggcattgccgcatctgcgatattccctttattgatatagaagttagaccccgtgaagaacgtggccactgccccacccagcaataccggacctaccactccgtttatcaccaggaacgtgcgatacgttgtcttacccagcagatttcccgccttcgactgaaactcgtagctgacagcctgcaacacaaagctgaacagaataatcatccacaaccaataagctcctccgaaactggtactatagaacaacggaaacgaagcaaagaacgcgcctccaaacgtgacgagcgttgtaaacgtgaactcccacttccgtcccgtagaattaatcatcatcttcttctgctcctccgtcttccccagacagaacagaagcgaattacctccctgcacgaacagcaggaataccagtagtgctcccagcaaagagactacaaaccaccaatagtgttgaagaaatatataagcattcattgtgagttatgagttataagttatgagttatgtgacggtgtgtgcgtttcggtttccggacctttgcgaatggccttcagcataattcccacctcagcaatcagcatgacagtgaaaagtaccaggaaaataaagaacgtggtctgcacggagcctacatccagcttagagatggcggcactcgtgggcagcatatcttggatggcccacggctggcgaccacactcggcaaccacccatccggcttgtccggccagatagcccagcggaatggtgagcatagccacccaatgcatccatggcatccgcgacaagtctttcttataggccaggaacagcaccacaataaagaagaggatgaagtacccacccaacatcaccatcacacggaacatgtagaacgtaaggggcacattgggcaccagctcgttcacgtccttgatataaccgtaaccgaaataggctacattatctttcaacactttggcagccacctctgcatctgcctcattgcccgcagccttggctgcacgataggcggcaaacgcaccgatagccgtttttcctttttctattttctcctctgccgaaagcgctacggtaccatcgctcaacggatatccgcctttcagcaggtcattgataccgggaacaaaagcatccatcttgcgctcggcaagcaacgacagcatcttcggaatttccacacggaaaaggaatgggtctactccgtcctgcggtgtctgcttggcaggattcagcagcccgaacgctaccaatccggcaccttgccgcccttcataatagccttccatagcagccagcttcatcggctgcttttgcgccacctgatagcccgagccatcacccgtccaggcagagagcacagcggcacacagacctacccatgcggcaatctttacacttgccagcgcaaatttcttctcgcgcttcttccacagataccagcagcttacgcctactacaaacacggcagccagcacccagccggacagcacgctgtggaagaacttgttgacagccatcggcgaagttgccacagcccagaagtccaccatctcgttgcgtgccgtatcgggattgaactccatacctacgggattctgcatccacgcattggcaaccagaatccaccaggcagaaatcgtggcgcccagccccgtgagccaagtagatgccaggtggaaacgcttgctcaccttatcccagccgaagaacatgacggcgataaacgttgcttccataaagaaagccaaaataccctcgatggcaagcggcgcaccgaagatgtcgcccacaaaccaactgtaattactccaattcgtaccgaattcaaattccagaataataccggttgctacaccaatagcaaagttgataccgaaaatcttcatccagaatttggcagtacgtttccaaaattcgtcacccgtacggtagtacgctgtctccatgatgcccataattaccgccagtccaagtgtcagcggcacaaaaatccagtgatagatggcggtcaaggcaaattgggctctcgaccagtcaatcagggaagtgtcaatgtgtccaagcataagaatcaagttatgagttataagttatgagttattaagtttttaagttatcgggtaagaacagagagacacggagaatttataagggcaaggaaataaactctgtgtctccgtgtttagtcgcccagactccgatggataagctcattactgacatagccttccttgtcatcgcccaccacgggggtattcagaaaccgtgggaagaagaaaaggcggagaatgaaaaacatgatgaacaacttcacaagaatgataagccacaaagtacgccctaacgtcatacttcgaaaaccttccaaataaaaacgccaaatgtttaccgcagtctgtttcatgccgataaaattataatgattacaaatataaaatacttttatataaagaacaaataaaaaggtgaaaagttgaacagaaaaaagacttctcccattcatcggtacaaaaaagattttaggcgaggaaaattcactcaacgtctatcacttttgcaatcctttctccaccccactacatttgcaaatgtaaaaccatagaataacgaagatatgacgaacgtaaaaagattgacagtgatagcgctatgtatggcaagctgcatgggagtggccgcccaaaacggcacttccacgcagatacccggcagttccgagcagccagccgacagcctgcccgcccaatgggacttgcaagcgtgcatcgactatgccttgcagcaaaacatcaccatccgcaagaaccgcctcaacgcggaaagtgcccaggtagatgtaaagaccgcccgagccgctctcttccccagcctttcggccagtgtgagccagcgtgtcgtgaatcgcccgaagagcgagacaaacaccatcatcgacggcgacaacatcaccagcagccagagcaagacttcctataacggcagctacggcatcgatgccaactggaccctctacaacggcgggaagcgcctcaacaccatcaaacaacagcaactgaacaaccgcattgccgaacttagcgtagcacagagcgagaacagcatcgaagaaagtatcgcacaaacctacgtacagatactctacgccgccgaaaccgtgaaagtgaacgaatcgaccctggaagtgagccaagccgaatgcgaacgcgcccgccagcttctcgaagcaggaagcatagccaaaagcgacctggcacaactggaagcgcaggtaagcaccgacaagtaccaactggtgaccgcacaagccaccctgcaagactacaaactacaactgaaacaactcctggaactggacggcgaatccgagatgaacctctacatccccgccctcggcacggaaaacgtactggcacccctgcccaccaaaacggacgtttaccgttctgccctcgtgctccgtccggaaatagaagccggcaaactgaatatacagacatccgacctcgacatcaaaattgcccgcgctggctatctgcctacgctgagcctcagcgccggcatcggaaccagccatgccaacggcaatgacttcaccttcagcgagcaagtcaaacagaactggaacaactcgctgggcttcaccgtaagcgtgcctatcttcagcaaccggcagaccaagagtgccgtagagaaagccaagattcagaagcagaccagcgaactggacctgctggacgaccaaaaaacgctgtacaagaccatcgaaaccctctggctcgatgccaacagcgcccagcagcgctacgccgccgccacagagaaactgaaaagtacgcagaccagctatgaactgattcaagagcagttcaacctgggcatgaagaataccgtagaactgctgactgagaaaagcaatctgctcagcgcacagcaggagacactgcaagccaaatacatggccatactgaatatgcagctactgaagttttatcaaggagaaaaaatcgaattataataccttatatatatgaacaaaaaaagaatcatcctcattgccgtagctgccgtaatcatagtgggcggcggcgtatggctcttcggtggtgccaaggccaagcacaaggtgacctacgccacagcaaccatccataaaggtgagatttccgaatccgtaaccgccacgggaaccatcgaaccggtgacagaagtggaagtgggtacccaggtgagcggtatcatcgacaagattcatgtagactacaattccgtagtaaccaaaggccagctcattgccgagatggaccgcgtgacactgcaaagcgaactcgcttcgcaacgcgccgcctacaacggtgcaaaggccgaatacgagtaccagaaaaaactctacgagcgcaacaagacgctgaacgaaaagcagctcatcgccgccacggactatgagcagtccgtctataactacgagaaggccaagagcaactacgaaagcagccaggcatcactggcaaaggctgaacgcaacctctcctacgccaccatcacctctcccatcgacggtgtggtcatcagccgcgacgtggaagcaggacagaccgtggcttccggcttcgagacaccgacactgttcaccatcgctgccgacctgacgcagatgcaggttgtggccgacgtggacgaagcagacataggcggtgtggaagagggacagcgcgccacgtttaccgtagacgcctacccgaatgacgtattcgaaggagtggtcacacaaattcgtctgggagatgccagctcaagcagcacgtcgagcaccagcaccagcacggttgtgacctacgaagtagtcatctccgcccacaacccggacctgaaactgaaaccacgcctgacagccaacgtcaccatcttcaccctcgaccgcaaagacgtactgtgcgctcctgcccgtgccctgcgcttcaaccccgaaaaaccgcttatcggcgacaatgatatcgtgaaggattgcgaaggggaacataaactctggacccgcgaaggcaacacctttaccgcccatccggtgaagataggtatctccaacggagtcaacacggaaattatcagcggcattaacgaaggtaccgtagtggtgaccgaagccaccatcggcagcatgcccggcagcagcgctccggacatgagccaggaagctcccggaggtgagaagagtccgttcatgcctggccctccgggaagtaagaagaagagcggaaaataatacaaaaaaagaattatgaataaagcagtcattgaacttcaaaatatcaaacgcaacttccaggtgggggacgaaaccgtgcatgccctgcgcggcgtctcgttcaccatccgtgaaggcgagtttgtcaccatcatgggtacatcgggctccggaaagtcgactttgctgaataccctcggctgcctggacacgcccaccagcggcgaatacctgctggacggtatctccgtacgcaccatgagcaagcctcaacgcgccgtactacgcaaccgtaaaatcggcttcgtattccagagttacaacctgctgcccaaaaccactgccgtggaaaatgtggagctaccgctgatgtataactcctccgtctcggcttccgaaaggcggagacgtgccatcgaagccctgcaagccgtggggctgggcgaccgactggaacataagtccaatcagatgtccggcggtcagatgcaacgcgtagccatcgcccgcgccttggtgaacaatcccgccgttatcctggcagacgaagctacgggtaacctggacacccgtacttctttcgagattctggtactgttccaaaagctgcatgccgaaggacgcaccatcatcttcgtcacccacaaccccgaaatagcccagtacagcagccgcaacatcgtgctgcgcgacggacaaatcaaggacgataccatcaacacccaaatccagaatgcagccgaagccctggcagcattgcctaagcaggaggaggaatgagggataagggattaaggattagggattaattttaaactttccattaaaacgatatgaacggaacaaaccttttcaaaatagccttgcgagccttgaacaacaacaagctgcgcgcattcctcaccatgctgggcatcatcatcggcgtggcgtccgtcatcacgatgcttgccatcggacaaggttcgaagaaaagcatccaggcgcaaatctccgagatgggctccaacatgattatgattcaccccggtgctgacatgcgcggcggtgtccgccaagaccccagcgccatgcagaccttgaagctgaccgactacgaagccctgcgaaacgaaaccaactttctggctgccgtcagccccaatgtctcctccagcgggcagctcatcgcgggcaacaacaactacccctcctccgtgagcggcgtgggcacggactatctcgaaatccggcagctcagcgtggagaacggcgagatgtttaccgaagccgacatacagacctctgccaaggtgtgcgtcatcggaaagaccatccaagacaacctctttcccggaggagaggaccctgtgggacgtatcatccgcttcaaccaagtgcccttccgcgtggtgggcgtgctgaagtccaaaggctacaactccatgggcatggaccaggacgacgtagtgcttgccccttacagcaccgtgatgaaacgcctgctggcacagacctaccttagcggcatcttcgcctccgccctcaccgaggacatgacggacaatgccaccgacgaaatcaccgagatactgcgccgcaaccacaagctgaaggagagtgacgacgacgacttcaccattcgcagccagcaggaactcagcaccatgctgaactccaccaccgacctgatgaccacgctgcttgcctgcatagccggcatttcgctcgtagtgggcggcatcggcattatgaacatcatgtacgtatcggtgacggaacgcacgcgcgaaatcggcctgcgcatgagtgtaggcgcccgcggtgtcgacatcttgagccagttcctcatcgaagctatcctcatcagcatcaccggaggcatcatcggcgtcatcatcggatgcggagccagctggatagtgaagagcgttgcccactggcccatcttcatccagccgtggagtgtattcctctccttcgccgtatgtaccgtcaccggagtgttcttcggttggtatcccgccaagaaagctgcggacctcgacccgatagaggccatacgctacgaataaccttttctcccttgccggaagttagccaaatagttcttaagtattaggaaaaaagtttccggcaatagggaaaaaagttatgcgaaaccaaggataatctctatcccaagccttgggatagacatccgcaagcttgggatacatatccgcaacctggaaacgcttatccgcaacctgcgaacagagatttgcttcgcaggcagcggatatttccaatatccacctaaaatccgtatctttgtatcatgatgaaacaacagctccctaacccacgccgccgcggcatcgaaaccctgatacacatcattgtctggggtatcgtcatcggtttcccctttctgatgatgacacgcagcggcttcaatatcagccttgcggactatctgcgccacggtagcagcagtaccctctcattcttccttgtattctacatcaactactgcctcctcattccccgctacttgttcgagggacgcatccggcagtatctcctgctgaacacactgctcatcatctgcattaccaccggcgcccacctttggcaagaatacacattccaaaaccatatgcgcggcgatgatgacggtcagcacatggggcctcccaaatggatattcatcttgcgcgacgtctcgaccatgattctcaccgccggcctcagcgctgccatcaagctgagccgccgctgggcgcagatggacgccgcccgccgcgaagccgagaaaagccgcacggaagccgagttgaagaacctgcgcaaccagctcaacccgcacttcctgctcaatacgctgaacaacatctacgccctcatcgccttcgatgccgacaaggcacagactgccgtgcaggaactgagccgactgctgcgccatgtgctgtatgacaatcagcagaacttcgtcaccctggacaaggagatggacttcatccgcaactacatcgaactgatgcgcatccgtctctccgccaacgtccgtgtggaaacaaagatagacgtccgaccggacagccgtacggaaatagctccgctcatctttatttccctcatagagaatgccttcaagcatggcatctcccccactgagcccagctttatccgtatccacttcagtgaaagccccggagagatacattgcgaaataaccaacagctatcatcccaaaagcgtggcagataaaagcggaagcggcatcggcctggaacaggtgcgcaagcgtctggaactgatctatcccgaccgttacgactggcagcaaggagtgagtgaggacatgaaagagtataaatctattttaattataaagatatgaatctgaagtgcgccattgtagacgacgagcctctcgccctggggttgctggaaagctacgtcaacaagaccccgtttctggagttggtcggtaaatactccagtgccgtacaagccatcaaggagttgcccgagaagcacatcgacctgcttttcctcgacatccagatgcccgaactgaacggactggaattttcgaagatggtcgattccggcacccgcattgtctttaccaccgccttcgaccagtatgccatagacggctacaaagtcaatgcgctggactacctgctgaaacccatctcctacgtcgactttctgcagactgccaacaaggctgtgcaatggtttgaattgctgcaacagcccaaggaagagattcagagcatcttcgtaaaaagcgagtataagctggtgcaaatcgaattgagtaaaattctgtacatagaggggctaaaagactatctcaaaatctacgaggaggattctcccaagcctatcctgtctctcatgagcatgaaggcaatggaggaacttctgcctgcctcgcgtttcatgcgcgtccaccgttcctacattgttcagaagaataaaatacgtattatagaccgtggccgcatcgtgttcggaaagaattacatcccgataagtgacagctataaacaagcttttcaagaatttttagaccaaagaagctaaaaaaatcgactaatccgtcgataaaatcggaaaaaacgtcgatttattatagaatccttttgcatattaaaatatgtttttttatctttgcaccgaacagataggagttgtgaaactcccccaatagaatagtttagttaagtctagtttagtttttgtgtgaagcacttcctccgtaagcgaacgttggaagtgcttttattttaggtgtatcaggtacttacggaaaaagcagatttccatcacttcgcagcaggttgcaaaatttgattgtcggacaattgtcggacagtattttttaataaccaaattgtcgcaactttattaaacaaaaagatggcaacacttaaactttgtatcgtaccagctaaagtgcttatcaacggaaagcacaaagtaagaatatctctggcacacaactccggtaccagatacattcctacaaactgtatcatcgatgacttgtcccaatttaaagatggtcaagttatcaatcaccccgaagctgcatctatgaacatgaagctccggaacctgctcaaccattaccaaaaagtcatagacaacatctatgatgtggatgtatattcatgttccgaactccgggaaatcatcatcaagaagaaagaccataccaatgccaaattctcctcagctatgaattcttatctatctgaactcgcagaagagaaaagaagtaaatcagagaagttatataggctatcctgccagtccttcattaagtcacaaggtgacttattactttctatgattacacctcggaatataaagcatttcgagatggaccttgaggataagaggttatcccctaccactatcaaaatatatctgacattactcaaagtgattatcaactatgcaaagaagcacaatatggtaaaatatgagattgacccttttgagttatgccgaatgccatccgctaatattcgtgaactagaccttactattgacgaagtaaaagctatccgggatatggaaattcccaaatacaacataggtgtagtacgcgacatatttatgctaagttattacctcggtggaatcaaccttatagatatgcttgacattgatttccgtaaagattggatagaatattaccgacggaaaacaaagaacaagaaaagcggtgaaagcaaaaccgcattttcaatccaaccggaagccagagaaatcataaacaaatacatgcaaaaaaacggaaagcttgtgtttggcaagtacaaaacattcgggcaatgctactccgtggtatcacgtaaaatggaagaacttgccaagatagctggcataaagaaacatgtgatatattattcagcccgtaaatcattcgtccagcacggatttgaattaggtatctccttagaaatacttgaatactgcatcggccagtcgatgaaaaccaatagaccaatattcaactattttagggtcatgcgaaaacatgcggatgatgcaatgagaaaaatcttcgacagtctaaagtgattgttcttggacgaaagctattgcctcgatagtagcttcttccctctccttttctatgtcggagttcaagcggtctattaagtccatatttcccgtcagcgcggttttcacacaatcggaaaacgtgactgtcagccgatagtgaccgtaaccaataaaggacttcgtgagcttcgggaaggatgattcagttttacccataacgcaaccggattaagaataagaagcggaaaaagaacggttccgctttcccgttgcgttacatatctacttacgtcggatacaggatgccattaagctatctcacgggggtcggaaccgtatatgaataagctactggcaaaatcaatcaccagtagcccaacggtcaggttctacccgacgcaaataaaagtatgtaacgcactgcaaatatggaaaaaatatgcgaaataacgaaaataattcatgcaatagttgtataataaccaaaagattattatctttgtaatgtcaaataacaaaagtaatcaacatgagtaacgaacaaattaaaaaggacctgcttatacaaagagcattcctcaaaaaagaattagaccagctaaggtttattgccgaagttaccggaactaaccaagaaaaagagattgataaaagattagaccgattactgacaatcgacaaaatattgaaagagttagaaaaaaagaagtaaaacaaagtccctctctccggagagggcactaaaaaacaaatatatggcactgaaagatgaattactggcattaaagccgctacttggtacagactctccagagttctataccaaaatgagagaaatagccgccaagtacaattcggaagaagataaaaaagctattgcagatttcgtatcagaacgcttacagaacattgataggaaactggacgttatagaagaaagtgcaatcaaattgcaattacaagaagttgccgaaatagtttctctaagctatcttgcgaaaaagtatttcaacaagagccgttcgtggttatatcagaggttaaatggcaatctggtaaacgggaaaccggcacgctttactaaagaagaattacagacattcaacaatgcactacaagacatatctcaaaaaataggctcacttagtatctcatattgatactctgttatttgacaccatccccgtagttgagccgctacggggatttttactgaaaaagaagcgattcattcaactgccttttccacaatctccatcactacatggcttgactccaaccagagccaataccacagccaaagcataatcccacccaaccaaacaaaagccacatcaatatagtacaaatttaatatcctgctaaccaatacacataagagttctccgcaaagcacataggcagcaaccatagtaacaagctggtcattggcaacagttatcaaaaccagaatgcctataacgggaagaagggaaatacaatcaattagaagttgttgtttgtcattcataatacaatagggattagaatacaaatataatcgttatctctggaaaaatctaatgaatgaggagaaataatgatggcagcactggtgttcaatgacttatgaggactttcgatgaaagcctcgctgatgcaaaagtgcaaggaaatgaaaggtaatgagagcgaacggttttcaaatcattacccgataatgaggtaagtttataggtcgttggagtttatttctactctctgctacattctgcataacagtgtacaactcgctgataactaattttgtaaccaaaaagaattggattatgcgaagtacatttaaggtgctgttctacgtgaacggaagcaaggagaaaaacggtattgttcccattatgggacgagtaacaatcaacggttctgtggcacaattcagttgcaaactgaccattgcaaaaacaatgtgggatgccaaaggtaatcgggcaaaaggcaagagcaaggaggcacgagacatcaatttagctttagataacatcaaggctcaaatcatcaagcattatcaacgcatttcggatagagaagcatttgtaactgctgaaatggtacgtaatgcctatcaaggtatcggaacggaatatgaaacattgctcggtgcatttgacaaggacaacgagagtttcaagaagcgtatcggcatagaccgtgcagcaagttcctacaaggtgcgtgttaggtcacgaaatcatttggctgcattcatcaaaaagtgctacaagcgcagtgatatttctatgcttgaacttactcccgattttatcaaggagtatgaaatctatctttctaccgatgcaggtttgcataatggtagtgtatggtcgcattgtatgtggctgaaaacaatcgtttcaaaagcacattacaatggactgacaccgagaaatccgtttgctcagtatcgggttaatcagaatatcaaggagcgacaatatcttacagaagatgaaatcaaggctgtaatgacacacgagtttgcagacaagaagttggcttatatccgtgacttgttcgtgttcgcaagttttacagccctgtcattcgtggatattaaggaactaactaccgatgatgtcgtagagataaacggagagaagtggatattgtcgaagcgacacaagacaaaggtcaatttccaagtgaagttgttggatattccattacagatcatcaagcgatatgagagatttcaagaggacaaactcgtattcccaaatctcaactattggaatatctgtaaaccgctgaaaaagatgataaaagagtgcggtatctcaaaggatatttccttccactgcactcgccatgggttcgcgacattggctctcagtaagggtgttcccattgagagtgtgagccgagtattggggcatacgaatattaccacgacacagcgatatgcgaagattaccaccgagaaaatagacaaggatttgacgatgttcggcaacagacttaataaatcttttagtgaaatttcaatagcaatgtaactatggaacgagcaattataacaatcagcgaaaatggcaaggtaaatatcccaagaggtaatgtttggatgtctgaaatggaattggtggagttgttcggggtaatagccccgacactccgagtcgctataaaagcgatatacaagagtggaacactttgccctgtaagcacccaacgatgtgatttggctacgcctgcaagttgggctacattctacaatcttgaagtggttattgctcttgcatttcggttgaacacttatgaggcaagcaggataaggcaaagggtgttggaagctttgtgccaacgaaaagagagtgaaattagcatactgttatcgttggagagtattgggcatcagatttcacccaaaggacactgctaatataagaatgagacctgctattcttacgaacggcaggtctcgaactaacgtcttatatgtaaatatctatcaaagggatgatagagtttcttaatcttctctattgtgcctcattattcaaaagccacacagtctgtcaatgttctgttagctggaagctcaacacttatatatgtattataattttctgctgtgatttctacctcaccacatacgcaatctttaagtgtaatctttgcatttgcagcaagagctgataagtctaaatagtaacctttttcaaatacacattcagtaaaagttgtagaaacatatgggcggataagacggtcatagtcttggtcatagccattgttttgccaatatttagatgagttctctccaaaattacattttgtgaatgaaacggcatcaagacctgcaagacttgtccaccctttcactgtagagtttgtcactatcagattcttcccattatgctcagtagtattgattgcataaccaggaccatcaacaactacattatcaatataaatatcttgtttaggcgatgaaataacaataccacgaccgacaggggtgtcaattgttaaattcttgattgtacctccatatgtttcaacagcataaccattgtattgaggattttcaatatccaaagagaatccattgccatcaagaacaccaccttctttcataactacagcaacaggcgttccataaatagcactatttgcaagaggagcggctacatcttcagcaaatacagttgtatatccttgactaagagcataatttacgccattagcagtacctactgttgcaatattattttctacagtataaacatttacagttacattgttagtagtatttgaagaaagatctgcgtttggtctgttatcacccacaactgcaccagcagctgattccttacctgtatctgcatattcagcaatcatatctgcaattacattagtattattaactacgcagttttcaactttagcaccagtcattaagcgtcctgctataccaccaacacttctgtaggctgttatatcaaggttgtttacagtacagtttgtaacagaatagcccgttttgctattctcagaaacatatccaacgataccaccaacgttattagcattatttttctggctgttaggagttgagagaatcttaccaccatctacatgacaattctcaatattaccatagatagaacctacgactgcacctgctttgtaatgtccagatatattaacattagacaattttacattcttaatgttaccaattacattaccaaacaagccagcagaattttcatcatcagtaacctttacagtcaaattacttattgtcttattaccaccatcgaaagttcccatgaatgttttggttgtaccgataggagtccaagcaacatttttcatatcaacatcagaagtcaatttcactgtataaccagagaattggttgctattggtattactttctgttgataaccagttaagaccatctactgagtagagataataggtcttggtcgctgcatcatatttaactccatttgtaacctcttcaaattcaggataattataatcatcatcgaatctttcatcaataacaatattgaattgaatatcgcccgtcagaagtttaccaagaatattggttctccaattacgttgtacgggaactgcatgtaaaccttcatcgaaaacgatgtcttcaccacctgacttaaatgtaaactgcagaccatctgcttccaaagtagttctcttttcatcgttatcagtcaaaatatagctcatagaaagatacttgtacttctcgttttcctgaatagtaccatctctatccacatcaacttccaaaattgcagggtctgtagggattgctgcaaaatcatattcaactgcctgttcgccttttacagtaccatcgagcaagttgatagaagtagcagcattcttgatgacaacctttgacgcggtaatttctatacctgattctactgctgctttccaatcagcttctgttacacccacattgatttgagcaaaaggacgcttcaatacaacatcaatttctgtattgcctgttaccttgaaagtttcagccttgaagaatgcgtcacgagtctcatcgttattgtcaccctcataatctacggctacttttagtccgtcagtttctgcagtaactgtgtaagcagtgcaacttgcatcctgtgcccaaaatacggctgtgtactcctgtccctttgccaatgtcacttctactgcatcttgcttacttccatttaggaaggcattttcttttttaagcagaccagcagttgaaccattgatagttgtaatcaattttccgtgtgcatcaaaaatagcataataaagcaaatctgcacctgtaccatcactgatagcacgggtagcgataccaccttcggcagcaagtgagaacgtcacctgagcctcatttcctgactgaaccacatccagttcgtcattcgaacacgatgttgcgagcaacatacctgctgctgcaaacatacctaagaataatttcttgttcatctttgaaaaatttaattgttatacaaatagttattttgattttcttgtttcttaatgtttgccacatcccttgtggatgtcgcacccattgtcgagggctgttctgcataggcagaaccgagtattatcatcaatctgttgtttcctgctgatgcagggtaaaggtctcggaactgttcctcacctttgcggtgttagcttgtttgttcttttatgttcggcttttaactcgttattagggttatacttatattgaaaatctcttattctgttggtgtgaaatttcctgcaatgttgcttctttggtttgcctctatctctacctgtggaaattccaccattttgctgttattgccatcagtcaaagtcaatttggcagaaatatttgtggctgtggtcggagcaaatacatagcccatagcgaggtagttatattccgtaccatcagccgagaatgtctcagttgtggtctcgttgatattccaagaaaattcggctgctccacttacggtattggtgaatgggtggaatgtcttgggagcaccacttgcagtaaatgtagcttgcatcggtgttcctgtagtacccacattgatttgagccaacgggcggacaagttcaacagggtaactgcaatctcctgtaatggtaatatcttccatcgtggcaaaaaaagcgtctgcggcttctgcctcagagaatgtaatcggattgggcagagtattcatcctcaaatccgcaactacgcgcctaatatgatacagaagcgaaaagaatctgcatcgttagtaaaaagggggcacagtgcatcgaatgtcaccataaagacatataaatgccccttaccccaccatgcgacttgaggcaatacgcaaaatcacgactataagttgtcggtgttatccaaagtcattctggaacacattggcataagcattgttgcatgaatagatattcagcacatacttccttgatgtcctgacccatttggctggcacagagatgaacttaaagacaaacgtcttgatgcggcttgttgctttgagtccgaacctcttcacgtcaagcctcgccatgatgaatttatagaagttgcgtatgagtgccataagcagaagaaacaccgtgttttctcccataaaggattttggaagcctgttccagccgaatccgttattcatatcatcgaagatgcgttccttccctccacggaggttatagaattcgacaatctctttctcggaagactcgtagtcatttgtaaggatgcagcggtaggtgtattctccttcccacaggtcgagttcgccgtctatccgcttctgtctttgaatcacaagacggtatgccttccctttccatttctcgatgagaatggaggccagctcaaactcaatgccgcccaattccactttcttccaacctctgagggcaaagatgtcattgtagagcgaactgcatcggttagcacggatatagaaggtcttgcagtgtttagcaatctcttccactatctcttcagaacacgagccgcaatcagctctgaaacggttgataataagcttgttttgttcaaacctttcaaagaacctcttcagcgtgtccttctggtggaaacggacatttgtgttgccgtcgctgttctcaatgccgacaatcaagttgccaataaccgccacgccagggcgataaccaaggaacttcttgtatgtaggcttcgcatcaaacttctcagcctctatgaactggtggtcgaagtcaacgtcatacccctcgccctctttcagctgccctgtggacaataggcaattgaggagcagtgtattcagcttgtctgccgtgttgaagtcgtaggtcttgccagtgtcggatgtgtaggaaatgttatcctgggtcagttcctttatggctctaagaatcgtgtcggcactgcatgtgcgaagtgtcggatgaagcgaaaggtggtacatcagatgagtggtgacatcctcgatgcatgagccgccacaaaaataaacgctcataagcgaacggatgatttcgctgtattgataaccatacagcctgcatctcataccgagggttgagtcgattacagatgagagtctggagtcaaattgctccattattgaaaatattcctccaaaaggagtgagtttctcggatttaattgctacctttgccatgtctgtcgggtttgatacatattttgatttgcaacactaagataggtgaaaaatctgacatggcaaattcctgagcaactttttgttgctcaggtacttaaaaagttatatttgtaatagtgttgcggaattaaggcttatgtcaagtcgtgctcctatcggtcttgtttctattgcaaagcatgaggtctgtacaaatcaaggtttcaagagctttattcctaaaaatataagtgattctatatatttgtactactacataaagcaccatatcaagcaaatagaacaattaggaacaggtacgactttcaaagaagtttcaagggatgacctttgcaagtttccaattctaactattggtgtaaaagacatctatgtgcaatggatagaattacaaaatggaatagcagacaaacagcttgctcttacaaaagaaattgctgctctaactaagcagcgagacgagctcttgccattgctaatgaacggtcaagccacggtaaattatcatttatctgcttgttaagctcaattttgcggtcaagcgcatataatatagagacaacatctttctgaattttaatgtcaggaagatgtatctctatttcctcaaatacagatttgggtaatattggagttgttgttgaacctgcaattttttgaaagtagggcttcatggtggaaagcaaatagtacacatacaatggctcaactccatttataaactgagttattgagtttatttgttggtttgttgcgcaagtgatatttgaatatgcaacatttcccatatcagaaccaatacatcccactaatacactttcaccagtaattgtattgcttgcaatttcttcaaatcctgtttgggtaatgaaacgattgtttcttcccatcatgcctaatccttttgctacatcttctggagtgtagaacggaatagttccgcaagcgtagttttccgctacacttgtggaaggagttttacctgttatcaccttgccgatgtcggcaagtttatatttctttagttccattctatttaatttcgattttgaaatagtgcaagttggacttgcactattgttaaaatcaattttgcaagtgcgcttgcaaaattgtattattcattatccaacaaccctcttatctccttatcgaagtcagagtcaatgcgttgagtcttattaaagatgtcatattcttcttccgcctttttcttggcttgtgcagccgatattttgcctttgtcgggcaatatctggtatttgcggaatgtcaagaactcattgacgcttgctgagaactgcgacatattgaacgtgttttcacgctctatcaggtcttcgatataatcaaagaaacctgttacggcacgctccagttgtcggatttctttctcttgcagatagttcttggcgatactaacatccgattttagcacacgtccgtctggggcattcttccatgtagtcaatcccatgtggtctttcgtatggtctgcttttgaatagataatctccgctgcagtctgtcctgtgatggcatagtgaaagcggttttgtatcattgcatagaaatctcttgtagtcggagagttcttgtcatagtcggtgctacattctgcatatatgtctgttatttgttgccaaatgcgacgctcgcttgtgcggatagagcggatgcgttcaagcaattctcggaaataatccttgccaaacacagcattgccttgcttcaaccgctcatcgtccatagcaaaacctttcttgatatactcattgagtatcttagttgcccactgacggaaacgagtggctttcaatgaagacacacgatagcctacggcaataatggcatcaagagaatagaagtcgataagctccttaacctcgccacgaatgccacgatttacgactgtttccattttggaaatagtcgtgtctgggtcaagttctccttcagcaaaaatattcttcaagtgcttgcttatagcaggaacaccaaccccaaagagttgtgccatagccttttgcgtacaccatagcgtttcgccctttatgactacttgcaccttgccgtcagagtcgggcatattgtaaagcagaaattgtatctcgttactcattgctgttctcttttcctacattttcattgaaaccgatacaatccaactgcttcagaatctcttcttctaaacggtgactctcgctgaattgctgtcttagcgtggtcttgaaattatccatacgacggttgaactcatcttccgtaatatccacatagtcaatcttgatgtcgaaatactgaccagcggagaagctgtagcccttctcctttatctcatcaaaagttggagtgacagagaagtcttcaaccacttccttgttgcggaatgtgttgacaatctgttgtatctcctctgtgcgcagttttgtcttttggttgccattctctttgattgtctcaccaagtttgcttgcatcaatgagtactggtttatctacaccagatttgtcgatgaacaccacacttacattggtgccagtgtttgcaaagatattacttggcatacttaccacaccacgcagaatggacttctcgccatcgaccaagtgcttacgtatcttgaaagcgatgccacttttagccgtgatgaaacccgtaggaacgacaatagccgccttaccgtcttctttcagactgtaaagtaagtgttggaagaagcacagataaatttccatgcctttcttgtttttggaaggaatgtttggaatgccagcaaagaaacgccccttgtaactatcggtcttcaaatcgctatgatagtcggagaagtccaacttgaaaggtggattgctgacaatatagtcgaacttacgcaacgagccatcctcattcttgtggaacggatgctttagcgtgttaccctgtattacatgggtcagagaatggctcatgctgttaaggataaggttcaacatcatcattgttgatgacttatcgctgatgtcctgtgtatagaccgtacagttctgctcaccaatggcatgagccaaggcgataacaagtgttcctgtacctgccgatgggtcatagcaagtcacgctccttacatcttccgacggatcaacaagcagttgagccatgatagctgcaatagcgtgaggcgtgtagtattcggcatagttgccaccaccattggcattgtaatcttttataaggtattcaaatatcgtggagaagaaatcatagccagcttcaaaggcattctcaaacgagaaacttgccacatcaccaattagcgaacggcaaaaggcattcttcttgttcgttccaccagaaaccacatcagatataggcttcataatggaaactctggtctcgtcctcattgaggatatagaagatgtctgagttttcgcttgctatactctccaatgtagaatcgaacagctcggcaaacttatcctcgttctgtcgcttggcaaggaacggaataagatgttcctttttcaagatgattgtgtcgagcatggaatcgcacatttcctcataatcatcttccgacattgcatcaagagctgcaaagaaatcctcggcattagccagttctggattttcttttttagcctcatagataaacttgtcattaaggaacttgtagaggaaaatctccacaataaccacatattcgttaccgctaccagcgagtccgttctctgtggtagtctttttcaagtcatcaatcagcgcataggtctgattttttatttcttctatatttttcattcgtttgttatcttgctatttgatattctctgtttattatctcactcacatacttgcgcacatcccggtcggtctttaccgcttcttccttgaaatggcgtgtgacgtaagtaaggatgttcttcttgaaatactctggaacttccaagatggattggttatggaaatacacatcgtccacatcttccttgatggcaagcagaatgatggtcattttctccttttcctccgtccatgcgtagttgcgtggcgtaaccttgcgttcggtttcttccttgtctttctctttcaggcgtttctccacacgcacaaacttggtatcaccattgtacttgatggcttccaaagcgtcacgttcattcagtttcttgatgcgacgcagaatgtcattcacgttctgcacctttttgtgcatattaaactcctcctgtgactccatttcctttttacggaacaggcgcaggaactcttccaagatagagcgatattctgggtcatcggtatcaacacacgctttcagttgctgtcgggcgtgttccacgctctgcttgtattgttcctgtatctccaactcaccctcgccacgcttttcaaaagaaaactcaatgttttcaaatgccatattgagcagttgctttgcattggcgttctcatctgaattgtctatgaagcccaacaggtcaagacggttcttcgctgcctttatcaagttgtgaatgtcgctgatttccacaacctcgtcagcgttagagccttgcgaagtaagcatgttctgcaaactccgcatatcttcaagagagttgaggactgtgcggacaacatttctgtcatcttccaaattgagttggcgagagaagatttctggattgcccagttcatagttgtcaagcactttcttggcttcatcaacccttttcttggcttcgtccattgacaccaacaagcgatcggtgttctgtatattgtctttgccaacctcatgttcaagttcttcttgatactccttgtttgtcttgctgtattcctcctcaatgttggcgaagtccaccacatagccatacttcatatccttgtatgggcggtttacacgtgtcaatgtctggagcaagttatgctccttgaccatacggtgcagatacaatttcttcaaacgtggagcatcaaagcctgtctggagcatctggaacacaataagcaagtcaattttgccatccttgaacagttctatccacttggcacgagtttccttgtcgaaactgtcatatgtgataagtgcagcacgatagcaacctttcttacaaggctttttcttgacttccatttcgccagcactgatacttttgtacacgatagaaccgtcctcgtccgtttcgttgtcaagttcgctttcatcggcatacttttcaagaaatagtcggtacatgagctgtgcctgttccttgctattgcacacaaccataccgcctaacgtgttgtcttcgttcttttggcggaatgtgcgcaagtcttctatgatataatcaagaagcggttgcacatacacatggtgggcatacacatcgctttcctttacgctgtgtacctttacacggatgctgttcaaagcctctttcaacttgattttatagtttgagcctatatcttcacgtatcagtcggcgtgtataaccgtcagcaatggacgcattatagaaataggtgtgtatgtaatcaccgaaaatatctttggtgttatactccttgctgatgattggtgtgcctgttaaggctatcttgacggcattcgtatcactggatatgagatttttaaggaaactgccgtctggactgtaattgcggtgtgcctcgtctatgaaatagatgcgctgcacaggtacattgtaggcattctttgccaaagcctttgaatcgttggagaacttttgtatgttcactacggttatctcaggcttaccctctctgttctgagtagtcaaaccgctgcttattatatttgcaaaagcccccttatcctgcacggaattgactttcagaccacgatacgaaaactccctttgggcttgtatcatcaagtccaagcggtcaacgataaagaagaactgcggaacaatcccttttgcagaataataatccgtcaggtatttcacattatagaatgataaggcagtttttccgctaccttgcgtgtgccaaatgatacctttgtttttgccagtctccaaatacctctctatggcttttgtggcgaacaactgcggatagcgcatgatgtgcttttgcagcccgttgggatagtcaacgtatgcgatgccatatttcaaaagaaaatggaaacgattgaaagaaaacagactgtcacaaatacgcttggttggagtatttgccagacagttagtcttgtattcactgctgttcttatattgcggcacattgttgtcacgcaaaaggacttcttcctcttcgggcgttacttggtgaatatgccgtgcagtagggaaactgtcctgtccctcctcacggaaacagttgtactttgtattcttctttccgatagtggcatagaaagcaccgatagttggcgtaacctcattattgtcatattccatatcgttactgaacaccattatctgtgtgatattcaagaagcgacggtattgtggattgacaaaacgttgtttcatgcggtctgtttccgcttgtatgcctttatggttattctctttctttacctcaatgaaagccaatggcaaaccgtttacaaaaatcgttatgtcgggacggtagttgtcgctgtccttgctgccacaagtcatttctgtggcaacctggaaagtgttgttcttataaaaatttacaggagaggacaaatctataatcttttctccagtattcaacagtatttcattgtagaactgtctgcccaaatcgtcattctgcaatgacttttgtattttgacaagcatatcctctgcatcctttttctccgccttaggattgagggtgcagtaagcatctataaaataatccgtcaaaatattcgttagtgggtcaaactccgttttaggagcctccacatattttgttttcagtcctttcaaggaaacatacttgaaacccatacccattagatgcatgagtgtggggaacttcaccctgctgtcctcgcagaacgctgattttgcatcttttgccatagtcatacgattttatttatccactatgaggtctttcatactgacagagagaatatcggctatctcgtttagcaattccaatgatggctgcttgcggttactgcaataggcatttatggtgctgaaactttttccgagtttctttgccaattcggtttgggagacttctttctcaaccagaaccagttttattctgttcagcttcatttttcaaacctttatttcctataataacgcaaaagtagtacttttatttcatcaaaccgctcgttttatgctatatttagtgattatgcgagtgtttttgtggttttgtagctaaatcagaacgaaataagggaatccttaattccgcaacactattacaaatataactttttaagtacctgagcaacaaaaagttgctcaggaatttgccatgtcagatttttcacctatcttagtgttgcaaatcaaaatatgtatcaaacccgacagacatggcaaaggtagcaattaaatccgagaaactcactccttttggaggaatattttcaataatggagcaatttgactccagactctcatctgtaatcgactcaaccctcggtatgagatgcaggctgtatggttatcaatacagcgaaatcatccgttcgcttatgagcgtttatttttgtggcggctcatgcatcgaggatgtcaccactcatctgatgtaccacctttcgcttcatccgacacttcgcacatgcagtgccgacacgattcttagagccataaaggaactgacccaggataacatttcctacacatccgacactggcaagacctacgacttcaacacggcagacaagctgaatacactgctcctcaattgcctattgtccacagggcagctgaaagagggcgaggggtatgacgttgacttcgaccaccagttcatagaggctgagaagtttgatgcgaagcctacatacaagaagttccttggttatcgccctggcgtggcggttattggcaacttgattgtcggcattgagaacagcgacggcaacacaaatgtccgtttccaccagaaggacacgctgaagaggttctttgaaaggtttgaacaaaacaagcttattatcaaccgtttcagagctgattgcggctcgtgttctgaagagatagtggaagagattgctaaacactgcaagaccttctatatccgtgctaaccgatgcagttcgctctacaatgacatctttgccctcagaggttggaagaaagtggaattgggcggcattgagtttgagctggcctccattctcatcgagaaatggaaagggaaggcataccgtcttgtgattcaaagacagaagcggatagacggcgaactcgacctgtgggaaggagaatacacctaccgctgcatccttacaaatgactacgagtcttccgagaaagagattgtcgaattctataacctccgtggagggaaggaacgcatcttcgatgatatgaataacggattcggctggaacaggcttccaaaatcctttatgggagaaaacacggtgtttcttctgcttatggcactcatacgcaacttctataaattcatcatggcgaggcttgacgtgaagaggttcggactcaaagcaacaagccgcatcaagacgtttgtctttaagttcatctctgtgccagccaaatgggtcaggacatcaaggaagtatgtgctgaatatctattcatgcaacaatgcttatgccaatgtgttccagaatgactttggataacaccgacaacttatagtcgtgattttgcgtattgcctcaagtcgcatggtggggtaaggggcatttatatgtctttatggtgacattcgatgcactgtgccccctttttactaacgatgcagattcttttcgcttctgtatcatattaggcgcgtagttgcggatttgaggtagttatgaaacattcaaagattttcaagagtttgtaaatggatatgtcgataatttttattttgaagaatttattgattttggagaccatgattatcgaattgagatatttaacggaaatgttatcggaacttatgctagagaaaaaactcatactttcaaaacaaatatctcatctggaggaataatgaggccatgttctgtatctaatgaacaaattagtttagcccaaaaagcagttgaatccttgaagataacaacgtcaattgtagatattgttacagacaggaataagcgaaattatattttggaagtgaatcctattatggggatattcgttgaagctggcatgaaatatagtgataaatcaataataaaaaatcccgatttatcatattcaaatgacgaattgaaacttaatgtattggttaattatataaaacaaataatcgaataatattatgacaaaaggtaacttgaataatttggataaaagctttgtgcaaaatcttagtaataattgggcacttgttacgtcaggcgcatcggacaattataatatgatgacagtaaattggggtggcataggttttctatggaataaacctgttttgtttatctttatacggcctgaacgttatacttttgaatttattgagaagtatgattatttttctttgtcttttttaaaagatgatttttctaacgttcatgaagtttgtggaatgcaatcaggacgatatatcaataagataaaagaaacgaacttgaaccccattataacaaaaaatggttgtatgttatttgaagaaagcatactctctgttgaatgcaaaaaaatatactcccaccaaatgtctcaaatgaactatgaaaatcatgaattccattcaatgattaaagataaagggagtgaccataaaatgtatatagcagaaattattgatatatgggtaaatgattaagtaaagttgttatttaatatattataataaagtcagttataatttctgccaattattagatcgctaaaaggcttagggctctatagcgatcttttttgtttatatctttctaatgatgtaagtattcggtaaaccacgttacaaattatgtgaattagttccgaatcggtgctattcgtagttgattcgtaactaatagtatctattcggaacaagtttgattggattttgcccaattacgtggtagaagttctgtcatatcctttttatccctttcattatatgggattttactcaggacatcttccagccagattctagggtctacttctgcagacttgcaggaggctatcagagagtacaccaaaggggcttatggcattttctatgcggttgtcatcaatttctattcttccgtcgtttacgtatctggaaagccttggaagaagcgcgtacgtatattcaatagctttacccatgcggcttttaggaagcactctaagataagcatcctgcagccacttttcaaattcaagtatcagcggataggactcacggatacgtttttccttacgctcttcagctgtgagtccggcttaaccggcatcagactctaccttgtacagcctaccgatgtagtgaatcgcctgtgtgaccagcgtcctgttttcttccagggcatccacgtacttccttctgccatgtgcccaacagccgaccagagtgattcctttcatctgctcaaactgttcgtaagctgcatagccatcgcattgcacaatgctacggtagcattccagcagttcacgggctaccatacccgaacggctgccacggtcataatggaacatgacgtcccccgtgacgccatcgcgtacgcaccactcatccccctttttcgccttatgtttctcattgtccatcacaggaatgacactctcgtccacttgcatataatcactggagagtatcttctgtttgagcaggttgtacagcagcttgcgtttctccaccgccatttcataccatccgcacatggtagattcgcttatgccaattcctgattcgcgatactgctgtgtcagacggtagaacgggagatgatacatgaacttgccgatgataatgtctgtcagaaccgaggagccttccatacatttgctgaccggaacaagaggtagcgggtgaatcagaatctgcctttcctcggggtatttctccatatcggatttactcatcactttgtggcggacggtcttcagaatatatacttttaccagaacacgttccaggcgtaaactctcttcctttccgatttcaatgaaatcatccttaagcttgccttcctcggctggttgtcccttcgggtaaagatcaataacctctacaggcagtgaggaagtgtccagagactacttgcggaccggtttttcctttacttttatagtcctagtgattgcttcttcactcttgcagacttcctcctcaagccgggatattttcatggaggacatttcttcctttgagaacaggaacagctggttgggatcaagcggaagactcttctcgttcatccggtcaaagatttttttccggagccagtacagggattgttccagcgaggaacccctgctgataagcaccgcttaatcctgacggagcttctcattttcttccaatcaggctttttcctgttcttctgtaagcatctgcatctcattgtttcacaatgtaaatatactaaaattcaatgatatacaaaagcgaacggagtcaaaaaacggtactattttcgaagcttttgcaggttttcaagtctcgtgcgtcgcgaatcgcgggcttccatgataccctccacaatcatgacaagttctcaccattctatatttgcacaaacctcattatcgctggcagaatcaggcttgcctaaagtgccggcttccagaagtttggaatacagcaccatgccgcctggctcccaatgcaggagttttatacggttacgggcacggtttatgaagatatacacgttgccgttgcaggggtcctgccccatggcgtctgtgatgataccgctgagggtatggaagcttttgcacatatcagtcggacggttatacaacagatagcgcatactgtcattaaggctgaacatggttgcaggcccagatgattgaaaacagttcattttcatttaactcaccgcagatgcgtatgacactaccagccggtgtacgtatttccatctctttcaatccgcttggcgtggccggtgtacttttctgtttccgtccggttgtaccggcaaatgaaagaaccggaacaaaagatccgctgtgtggaagctcgataaactaaccttgagccgttttacccgatgattgcttggcggcataacgggatttgctgtcataaaaacccgccatacagggatattgagttcctctaatcttgacttataagtcactttgtactctttacagtaattcattatctctgctacttcttctcgtgtcatcataactttgttttttgaacgtaaagttaatgacggaagtttgaagaaaaaatgcgtggtttaccggatgcttacgcttttatacgcattcaacttttaataaagctgttgtataagaaaaccgtccactttctggtataaataagtaaattaattccccattttttaatttggatgaattaaacaattcatcaagcattataaaaatacttgctgctcctacatttcctacataactaagattagtaaaccatttttgttcatcaagtaacaatcctttttctttcagtttatctgctaatttgtcgtagaaaaacatagaagagatatgcggaagaaaatagtccacatctgcaaagttcagctggtgtttcttacaactattagctatatgtagtacggatttctcaacaccatactccgccaataattttatattttgctttattgcaaagattgattgcgtctgccaatcaacagggcgcatagccttccaactagtccattctccacttgcagtattttgtaatccttgtgacatacatacgtcaagttcatttgcataggatacagattcgatccattttatttttaatgatattccatctgacggcatatctgacaacaatgcacatcctgcaccatcagataacatccatctaagaaagtctttttcaaatgcaatatatggattggattgaatttgacttattgctttatattcttcctcaaagatgtttgaacgaagtaagggagaaaataattcagagcctccacatatagcattatttgtatgcccagataatacggataagaaacaatattctaaagcatgggcggcagagcaacatactccagaaggagataaaatcggaatcggattgctgtcttttagcaaaccatgaaccattgatgtatgtgaaggcatcatttggtcaggcgtagaagttccacatgataatagttgaatatccttagctgcaaatccatcatcaaataagccagcaatagcatttgccatgagttccgcattagtatgggtataatttccaccttttatagcataatatctttgcttaatctgattttgactgagaataatcctctttatacgcgaagaatgccctcctatatacccaagggaatcttccatttcatcgttttcaactggttcattcggtaaaaaactagataatttagtaatataaacatttttatccataatataacattaatagtttaattaaacaaacagtacatcctgtctataccacaaaaatactattaattatatacgaatagataaaacagtattttattttggaaaaattaagctttaatgcgccagtttaaaatacaaatgctgaaatttttctaataaacaattcgtatcgtatccattaggagtagtcatactcatataagaataaccataataaatttccataaatgacaatttttcaacctcgacatttacactattttttatttcctgcttttctatacctaataacaaaagttctttccaatattttttttctttttctaaacgctgctgtgtttcattggggatttctttcaaaagattcatgcaatttgcagcaatataaataaatgcacgatttatattttgaatacctatacttgtgaaaaactcctgttgccgttgttttacagcaataaaatttttgatattatcccacatgctttttgaaacatctattgttggtaaatcatactctttattaataataaacctatcaataattgatgccaatatctcatctttagatttgaaatgatataatatagcccctctacttaatccagttactttttctatatcagtaaaagtaatatcgctaaaaggttttgtggcaaacaatttaaaactttccaacagaatcttctgcttactaacattattcggatctttatatctcataatacataatatttgttacaaatttaataaaaacaaaagaatcaatggcacataattgcttttttttaacgcaaatacaagattacaagagaattgtaatttcatttaagagactgttcaatattcccaatataggtggatttgtaatctggcatattatttatgttatagcaatatttgaaacatttagccaaaaacatattttccaatatatctgctattgagcaaaaatttatatttccacaagataatttatatttttcagaagatacttgaatccaacactctctctctgctttcaataaattccgcatatcttctttgaaagtaggaaggtataagtttgcctgttccgctagatgaaaaaatgcagaataaggacttattggaatactttcttgctcaaaccaattttggattttatttaaatgctcgtttttcttatcccaatattcctccaaagaatgcacattattagaattaataggataaaatatattcaatggggaaaaaaaatattgtttaacagcatccttgaatattgcttctttatccttaaaatgataaaagatagctcccctttgtaacttagtgacccgctccaactcaggaactgtcactttttccacattcttctgaagaaataatttaaaagcttccttcaaaataagctctcttgaattttccacaggtttattgaaccaatctgtctctgccataacgataaggtaaatagtttattaaatttctttaagtaaactctttaccatatctaatatattgaaaggcacagagtccacccgtttacgtaatagaggcactagcaagcccgaaagacaaaacgagcgacctgtgccgtatttaaacaaatacgacacacccgcttcgtatatccttgtctttcttgaaagttgctagttttctattacaagttcacacgaatacgaatcgaatgagacaaacccattctacataagaatggtgatattacacaccaacttactgcaaagatacacaaaatattataatgtgtgaaagttgattaaggaaataacgaattttaattcaagatggttggaagtagtatattgtttccaatagattataaaaaaaacagccaaactcttagataagaattcggctgtttttagatgtgtatgtcttttggatatatactataaccaaaatgggtcttctttccaatttgtggtaaagcccattgctgtggtatctacattcgggaactcctgtaacagggacttgaaatcttgcaccagtgtattttcaggttcaattgcattaagccaatagataaggcagcaaaatacagcatagaaacgattggccatttgcggtttgtccgttatccaggtatttcgcaaggtggcgggtaactgtggtatgacaggcatcaccctgttccaaatacgttcatgatgggcgcaagcatttcttaacgcattgaccgccttcatccaactttcaagcatttcatgctgtggtacgccatacgaacgggcgattttctttttgatagtcgtatcggcgaaattgaaatagagcttagtcaagcaaccgaatgaaaccaattccaatattttccatgccggaggataaccttctttgccgtatttaacacaatgctccttgataaactcgtctttggagcgttggagttctctctccagcgtacttaagttctctgtaaacttatgcttgtctgtggccaattccggctggataaaccaaaatgcgccatggcttaacgagaaatgattgataatcttggcacgcaaggacacttctatttgttgtattgcagagaaaataagcattcttagccgtgtatcgaacagatatagtgacacagccttgccaaatgaggctccggacttgtattggtgcgtaaccgtatcttgctccataggacgaagatatgtcctgaaacggaaatagctgacattttcaagaaatgccaacgccttgttgtcgtcagtaattgacagtcccctatcttttaatgtttggattaaagcaggaacttcaagaggggaatttgtataatccataaacgtatatataaaaaaagttccgccctggtacgctgttctacgggaagcgtggcggattctagcaatgcaaatgtacgactttcttttggaatatccaagagtttcggacaaatcaattcatttttaactattttaaagcctgttcttatccccatgcgatcggttccacgtgtcgtaatcggaatacgtaggggtatcatcccaaaaggatgatttctttcttcttttgcggtgtttgggctttttatcgtagtcatccccaccggaaaatatgcttttgagtattacataacctaccaaaagtattatcagagcgtccatatattcatgttttaagtgttttgaaatcagtatgtaaagttacaaaacaatatctatataatcaaataatcacagagaaaattcgcaagaaaaacgctgtcagaaaatacctaaacgggcgacagcttcctcttttgtctcccggacaaactgcaagagaataccgggattgatgtaacggttttggaatttgcaggtaaggtgcaaatggggaccggtactgcgccccgtgttgccggtaatggcaatcacctcgccgggcatgacggaagccccccgacgaaccagcacttgggaaaggtggcaatagctgacggtgtaaccgccgtgacggagggtgacgaagttacccgaacgcctgtcgtaccccaccttgaccaccacgcccgacaacatggcgtaagcttcttcacctttggcacgcaggtcgatcccgttgtgccgactgcgcttcttgctgaaagggtcgatacggagaccataaggcgaagtgacagtaatacgcttcaacggataggagacgctcatgtatcgccgtacccactcgccatactcattggcagggaatttccctgccgtagaaacagactccttatttggattggaaaccttttctacagggggaaggcctttttttgtgtctatgcgacagaccggctgccgcctggctacggtgtggaactgcgctttagcggacagacacaccgacagcatggataatataagaatcgctttcatacggacaaaggtagggagagaacttcgactactttatatataaaggaggaaaagcactgaattttaaccttgtataagccatcatacctgggaatcatactcgcaaccaacacacgccagaatgggttgaattttcctggagtatgattgacagtctgatttttccgtgtttccataaataacttcaaaaacggaacgatttttcgtttccgcccaatacaggtgcagacgatgaatttattttgcccccaaaagtgaacttatacccaaaggattatgaactatcaacacaaattcaaagaggaagaaataccttacggcatcctcaaaaaattcggactgacccgtgaaatgattggcgacttgccgcaatcggtgttgcaacaggtatgtgacggctaccgttcaccagtgctgcctatccatatcacggatgaaggagggaatatcatacaagggcgcacacgcttcgcattggtcagaaccgaaacaagggaagcggacatcctgttttatccggtgcttgcccaaagtcgattggaacagttcagcgaggcaaactgccaaaagctggaagccgggaaagcggtgatggctaccatgaccgatgcggacggcagacaggtgcaagccttccaccaaatagacgaaggcaccggacagattctttccgtgccgacacccgtcatcggccgtaacctgcaatacttctgcgattattttgaactgagcaacgccgaactgaactgcctacagaacggtgagcctttgacactggttgatgaaggtagtatgttgacactcggtattgacttgcatgaccctaccggcatccgcatcggtatcggggatgaacgccaatggcgtgaacagaacaagaaggggttgaaaaaatacaacttcgggtgcttcggctgttgggtgatggatgaacagggcaatctggactatgtggaggaaaaggaatacagtgaagagatgtgggaggaaatgaagaagaacggggcaggcaaattgaaaatgaagaattaagaatgatgaatgaaaaattgggaacggaaagattctatccggaagaaacgcttgtggagaaggtgcagagcggcgtgttcggatggctggggtatgtgacccaccactccaaggcatggaaacaggagtatgagcggtattgccgcctgcgtgaactaccgatgaatgacggaaccgccgagaagttcctgcaaatgaagcaagaagaactggaagaagcgatagcgaacggagacgcttgattgaaccattaaataagagaatacaatatgtctatccgaaagaataccaatccccggccgttggatttaccgccggaaatgcaagacctgttgctgcgtaacggcatgcgtggctaccttgccggaagcagcgaagggtttgccttgattgtgcaggggcatgattcgcccttgctgacctatcctgtcagcgagaagcaactgcgtgcgctgaccgactggggcacgaactccgccaacaaacggtgctacaacacctttgcgagtatcgtggccgccgacttcgacctgccaaaagacttcgtacacgcccagaacgccaacggacgggtcgccatgggactgcacggctaccgtatcggttccggagagtatggatgtgtgggaatgcccatgcatccttttcatccaatctgccacggcttcctcggctggacaccccggcaacaaggaggcttccacctgcggcgcatcggcggagacctctactatcccggtgcgcctatcgtgccgaaccgcccggacggacgtatgaagccgggggaactggaatcgggcggctacggtttctattacaaaggacacgccaccaccccggtagcaaagaaggatgtgctgaaggagttgcagaacgtggtgacacccatacaaacccggcagagaagcagcgagccagccaagccttataaggagctgatagcctcaccggtgtatttcaccaacagaaagtggcaggagtgcctggcaagccacggtattatcgtggatagcgagacacgaacgctaacggtgcagtcggcttcggtagacgcagacctgcaatacgacctgacagcggaggagttggccgcactgaccgccaacacgctggaggaagccacgatggagaaacggctggaaattatcaacggggtaatccaagatgattatgacggcaaagtgacattggatatgctgaatggcagggagatagtgaacctgcccttgcacccggaagtgctggaggatctgaaccggcagctcttgaccggacagcaacaggcagaaagaaccaccaacggtatatcggtggaagcggaacaagggctgcgggagggattaccaaggggcggtgtggtgatggacggcaatgacctttcggtaatccgtcccgataaaggttggtaccgggaaggaagacatggcagggaggtgacagtggacgacatccgtgtggagccgtccggacaagagggaacatacaagatgaccgccattatcgacggcgaacgggtaagccacgagattacgcagaagcaatacgacaagtttatggccattgatgactatcaccgcctgaaactgttctccaaagtgttcggcgaggtggatatgaaatcaagagaccggactccgttgggagtgaaaatcggtgccgccctgcttgccggcgtaacggtggctgctgagttggagcatgaccaccattgtcattcaagaccggtagtattcgccgaacatcaccgccacgggcctgcgccacgtccctatttcaagccgggagtggatacgcctatggatgtggccgcacgcaacttcgaggcggcggtgaatgaacatatccgtcatgaaatacgccacgggatgtaaccaaataaaaagaacataacacaaacacaccttatatatgtcggaactgacctacgaagatttcaagcaacgcatcaacatccaggaggtgttgcaggatgccggctaccgcctgaaccggaaggacggcatccgctatccctcttacgtgcgcttggacagcaatggccgccgcattcgtggtgacaaattcattgtcacccgaaacgggctttgctgtttccaaccgccggagcaacggaactacaacatcatatcctttatcaaagaacatccgcatttttttgctgaatacacaccggggatgtcgaaggacagactggtaaaccttgtatgcaaccgcctgctgaaccaacccatgacggaacgtaatactcgtgtattagacccggagaaacataacagccccttcaatgccggcgattacgaatggcaaagcttcgaccgggggaattgggagagccagaagaaattctatccctacttcaagaaccgtggcatcaaccttgccacccaacggttgtttgccgacagtttcttcctgaccaccaagcaacggacggacggcaagcgatataccaatctctcgtttcttttggtcttaccaggcaagccagacgaaaaagtgggattggaggaacgaagccgcccgaatcaagagggaaaaatggtgtataagggtatggctgccggaagcaatgccacgcaaggaatatggataggcaatccggggcacctggctttaccggaggtgaggaacgtgtattggtttgagagtgcgctcgatgcgatggctttttgccagttgaacgcaagcaaactgaatatggaggattcagtgtttgtctccaccggagggtcgccgagccagcaacaattcaaagggatgattgcagagacaccaactgccacacatcatctttgttttgaccgtgaccgtgccggacaggtattcgctatcaattttgcgctgacccatgccggaagggagttctccagttacctgtcgaaagccgggaatttaatcgtgcaagattgcagcgagggttatcaacgccatgaaatagcaatggaaccgtttgacttcaagaaagtgacagtgagtttgggcataaatgctttgaagcctgatttggaagatgcagttctcaaatacatggaaatgggtgacggatatttgcaggagatgtatatgaaccgtagggacaattatgaaatcagccgtactgacggtgcgacaaacaaggaggaattggagaaaatggaaaacgacctgcacgctatctccaaagctctacaaatgctatcccggtccggcacacctgccatgggaaacatcatctatgagccgacggctgaaggttacaaggactggaacgaccaattgcttgacaaacggatggaaacggaagaaaaggaacttgatgattgggaaatcagtggcagggctaccctgaaccgcgccttgtccgatttgcctgaaatcaatcccgaacatatccgtaccggcctgtatgatgaagcagaccatgaagctgtacgcaaacggattgagcgggcagagaaagtcgtgcagtcttttgaagtcaatgacaaaggaatgccggataaaggctttcaggagatgtatgagatacaggaagaacttgcccggttggaaacggatataaccaactcactttcgggcataagagaagaataccaaccccgttttcaccgataatccccatgaagcctatgcagaccgcccactacggaacccttgtcatccgaccgcgttccatgcaatttgccattgatgaattgcccctgctcctgctttgccttgccggatacggctgtgccgggatagagaaccttatcggtagcggtatgctgttgagagtttctgtgttgtgcagcctttatctactgtaccgattcatctacctgcgccgtaccgaataccttatcagcagcgaacagataatctaccggcatggcgtgttcagccgaagctgcgactacatggagctgtaccgtgtggtggacttcagggaacaccgcagcttcctgcaacaactgaccgggctgaaaactgtgagcgtgtattcgggagaccgcatgacccccaaactggatatatacggcgtggaataccggacgaatcttgtcggtcatatccgtgaacgggtggaaaccaataaacaacgaaagggtatttatgagattacaaaccgctagcctcctactgcttatgagcattctgtgggtacagtatgcagtggcacaatatgtacagaccaatccactggagtggatggcacttgccgaaggaaatgaggctatcaatggagagatagagagccagacggacggacaactgcgcacggctgccttgcagaataccattgccgccgagtttaataaaatccatgaatgggaacggaaatacagcagttacctgcaaacggccagcgggtatgcttcctcgttgaaagccgccaccacgttgtatgaggacggcgtgcgcatcttcatttcactgggcaggctacacaaggctgtaagcgataatccgctgggcgtcatcgccacgttgtcgatgaacaacctgtatatcgagaccgccacggaactggtgacggtctatacgctgctgcggaatgccgtagccaccggagggccgcagaatatgctgaccggtgcggaacggagtgaaacgatgtgggcgttggccgataaattaggcgcattcaacaagaaactgaacaaactatgtctgagcatccgctactatacgatgatggacgtgtggaacaacatcacctccggaatgattgaccgggacaacagcgagatagcgcaccttgccttagaccggtggaaacgggcggcaagagcggcgaggtattaacgtaagaagaaagagcacatgaagaaatggcttggatattacatcggatttatcctgctgctattggcagggacggcgaaagtggaggcacagattgacccgacactggccgggatgatattaggctacaccaacaaggcggagaaagagctaaaaagccaggaaaaggcgatgctgatgcagacaaccggacatctctggatgcgggaagaagtggaaggcacgaccgatttgcaacggacattcaacaactatcttgattcgttccgggatatcgtgtgctatgcggcacaaatctatggcttctaccacgagataggacggctgtcggacaacatgggagacttgtcgaagcaacttaggcaacacgctgaaggggcttttgccgtggcactgacaccccggaggaaccaaatttaccgtgacttgatattgggaagcgtggaaatcgtgaacgacatccggcaggtgtgtatgaacaacacgaaaatgacggagaagcagcgcatggagattgtattcgccatacgccccaagctgaaacggatgaacaagaagctgaagcatctggcactcgccgtgaaatatacctcgtttgttgacgtatgggcggagattgacgaagggagccgacccagaccgacggacaaggctggaatcgtgcaggctgccatgcggcgatggaaacggagcggaaaccgataacaaaacaatcaaaggaatcatataaacacaatcaacacgacaatgggaaaatggtcaacaatcttaggtataggcaaaaaagtagccaaccactcggcaacacaaactacggcacgcagtatcggaggagcacttgtgcatccccaacgcacacttgtaggattgggaaatgctaccaaaacagcggtaatgggtggtggcatgggatatctcgcttgggagaaacttgtgaatgacaaaccgatagtccgtgcggcggcagacctgctggtcggggaagaagccgttgacaagggactggaaatggcagggaacgctacaaataaaatagcggatgcggcagacaaagccggggaaagcctgcaagaggtaagccaatcggtgtcatcgatgggtgcgtcttggggtggtgtgggtacttttctgcggaacatgaccggcggcaacggcatggatatgttggggaacttcttcggcaatctcggtaaggggaacgtgtcgggactgggcatcttcggactgttggcttctgccatgctggtattcggacgcttcggttggcttggaaagattgccggggcgttattgggcatgatgctgattggtaacaattccaaagtggcacaaccgttgactcctgcggtgagtgaagaacagggacggccgggaggaatgagaaggtaatgaagaatgaggaattaagaatttacttctgaagacaaacacaaaagagacacaatgaatatcggattattggcagtagatagccgttaccctaacctcgcactgatgaaaatcagcagctaccacaaggcgcagggcaatcgtgtggagtggtacagtccgctcagccgatacgacaaggtatatttggcgaaagtattcacctttacgccggattacgcatatttcctgaacgccgacgaagcggaacgagggggaaccggctatgacataggaaaggtactacctccagagatagacagagccgtaccggattacagcctgtatggaatagacaaaagaacggcttacggctttctgacacggggatgcccgaaccggtgcaagtggtgcgtagtaccccagaaagaagggaatatcaatccttatatggatatagaagagattgcggtggaggggcgtaaccgtatcatcctcatggataacaatgtactggcctcggactacggactggggcagatagagaagattgtccggatggggttgcgtgtggacttcaaccaaggattggacgcccggttggtaacggatgagacagcgaagctacttgcacaggtgaaatggctgaaacacatccgcttcggttgtgacacacaagcgcagatagcggaatgcgagcgtgccacggctctgatagataaatacggatacaagggggaatacttcttttattgcatcctgctcaatgattttgaagaatcattttcccgtgtgaaccattggaaacagaaagggaggcgttttctgccctactgccagccgtaccgggatttgcacaatcccaaccaaagcattccccaatggcagaaggacctggcaggctgggccgataagagatggatattcctgagctgcgagttcaaggacttcataccgagaaaaggattcaagtgcagcacatatttcaaccataaaacggagacgaatgaaggttttgagcttgtttgacggaatgtcatgcggacagattgccttgaaacgacttggcatccggacggaaacatattacgcctccgaaatagaccgatacgctatccggcaaacccaactgaattttccggacacgatacaactcggcgatgtcacacaagtggacgtgcgccaactggagccgatagacctgctgataggcggaagcccctgccagtcgttttcctttgccgggaaacgagcagggatgtccaccatagacaaggaggaaatctatacgttgaagcgttatttggaattgaagcgtgaaggcttcctgtttgaaggggaatcatacctgttttgggaatatatgcgtatcctgacagatattcgcatgtacaatcctgatgtgctgttcctattagaaaatgtggaaatgggcaagaaatgggagcgtgtactgagcgaggctatcgggatattcggggtgcatatcaactccgccctggtgtcggcacagaatcgtgcccgcatctattggacgaacatacggacaaaaaaggtcgggctgttcggtgaactgcacgccgacattccgcaacctcaagaccggaagatattcctccggcacatcgtagaggaagaagcggacaagaaatactacttgagcgaaaagatgatgggctggctgaaaaggcatggcgagaaacggaataccgacatgaacgtgctgggagacaacaacaaaagccactgcctgacggctaccgcacaggccaaaggaaacctgaccacgaactatgtctgtatggccatgcgtggacgagagacctgcctcacttcccggaggacggagtatggcaagcggatacgcaaggcatacgaagccggcagcattgccgaactccgaaagaacatccaacagcttgaaccccggacggacggcaagacaaactgcctgacgagcgtgcagaaagacaacttgatatgggctggtctggccggatgcaggccggacagaaagggaaagacaggcacttgttcccaaaatccgctcccctttggagaaatatgtatgtcgtgcggacgcatccgccgcctgacacccacggagtgcgcacgcctgcaaaccataccggaatggtaccaatggaaatgcagcgacacgcaacaataccgtatgttgggaaacggctggacagtggaagtgattgtacacatattcagcttcttaaaagataacatccatataaacatcgcctggcaacaggcttgaaacaaaagacaatgaactatacgcaagaaatgaacctggtatcgaaaagcggctattgtatgccgtttgaggagagtaaaggagaagtgagcctgacgctgggctacgggaagcagatccacccaatgacacaggaggagtttttccaccatggtgtggacttcgctacccaccgctatatccttaccgccgtagcggacggtgtggtgtcgggtatcggcagcaaccccacgcacgggctgtaccaagtgatacgctacgttaagtatgaagtgacctacgcccaccttgccaacgcacttgcccccttcggcgcacgggtaaaggccggcagcgtggtgggtatcagcggagacctactgcatatcgaagtgaagtatgacggggaggaaatcaatccgatggagttccttgccatgctgtacggcaacctgctggcaatgcggcagcaaggacatccgggtatgccggaactggagacgatggaaatggatattccgacaatgtatgacgatgaccgggaggaaatcgaggaactgatgctacgcttctacccggagtacctactggaagtgggcaacggcggctaccgtgtgccggagcatacggaacaatcgctgcgcaacattttctcacagtccgccgtgaagaactatttctatgagatgataccctcgctcgccaacccgttggggataggagaccgctcgatgccgatagccgccaaagtgcagaacctgcttatcagcgacttcctgaactacctcgctttgcgccacgagatttttctttccacgctgagcgaaaacgataaaaaaaaacggccgaccaagccatagcgacttgcggcatggtggacccgcttaccgatttggagatagacgtgcagagttttgacattccccggctggtgacggtatatcccgacaaggccggaatgcggtggtggacgaaggcatggttcaataaccgagaagaaggcgaagcctccgtggaaatcagccggcaagtggcggtaaagttcatccaaaacctgattgacaaggatacgatgctggaagaatactttccaaaacagatggaagtgtaccaccacgccatagaacagaccaaagaacaactattgcaacaaatgaatttgacatgagcaaaccccgacagacccagcattttgcagaaatcgaatattgcctgcaaaactacttcaacagccagctggctcccgtgatgaaggaagcccaaacctaccttacgcaaaagcaggtggaagaaatcggtgcataccacgccagtactgccggcgtgctgcgctctctcgccaacggtgcgaacggaatgccggacgactccttgccgtatctccggcagaccggcgagtggaacagcaagacaacagaggattatgtggcaatgtgccgggaacggatagccgccaccccggaaaccgtggaagacctgagcctgcttgccggagagtggcgcaatgccgttgtagcggaaatcggtagggaacagtacgaggaactctccaaggaactgggtggagacctcgcctttgcctacgtggactaccgggtggaacagatgatgattgaccgaatggcggtcgagcagatgccgaaatcatccgtggagtatatcctgcggaaaggtgcggaaggcagcctgctgggattggcgcaaggcatgatgaagtcgcccctgcaacaagagatagaacggcgtggcgaagccgcttaccggccaagcggtgcggagaaagcatggggtacagcggtgggtgtcggcatggacaccgtgatgatgggcggtatttcctcgtggggaagccttatcaagctgggcggcgtggaagcggtaagctatgcggtggggaaattcatggacggaacggaggatgctccggccatgacggtggaggattgtatcagccgtggcgtgttcggcagcgaacataatgtgttcgccgacttccgtgcgcaaggcaaggtcataaaatcctacgaaaacccttacatcctgtcgctcaacgagcggttggcccaaaagatgggcatactgaccgaaaaaccgctttgggcggaacttatggaagccgaggcgcaggttccgcatgggtggccattcccggcatacgagcctccttccaatgagcgcaaacccggacacggggatgtgcccatggtggtggcacctggacgggaagaagaatatctagcgatgatgcaagaggaagaggaaaaggaacgtgtcgaaactgcgaaaagggaaacggaaaaaacggctacggaacaagataatatggcggacaagcatcctacggagagcggtgagacgcagggaaagaggaatgaaaacggctggggcgacttgttcggcactttcgggctggacggtctggacgacatcggccaaaacttgggctatgtcatttccatgctgcccgacatccttttcgggctgtttaccggcaagtcgaaatcactgcttccgcaaaacaacctgttgcccatcgcttccatattgaccggtatgtatgtacggaacccgatgctgaagatggtactgataggcatgggtggcgtgaacctgttgaacaaagccgggcatgaagcccttggacggcaagggaacaaagttgtgcaaccctacaaggtatatgccgatgagccactcaatccacgcatcgccaacccggtgctgcaagggaacagcctgattgcggtgattgacaaagtgccgtgcagcatccaactgaccgacaatgtggtggatgcccaccgtagcggcgcattgcccctgaacacactcgccaacaccgtgcttgccaagcacgatgaaatgcagcaaatggcacaacagaactaccgggccgccgaagcggaacgggacgagggccgggaacgcacaatcctactcaaataatcaaacaaccctataaacacaacagcaatgaaagaaaaaagtccacgtgaacaatcggccgcccaccaacagacagcactcctggtaaacgccctgaacggtgcggttgccggtagcggctactggctgaatgcggcgggacggaatttaccgaaattctatccgaagggtgtagctgtcagtccgttcaactccctcgtattgggcatgcacaccgaccaaagcggctacaagaccgggctatatacgatgttctccgacgcaaagcagcgtggagaggcaatattgcaacaggaacacggcgtgccgttcaactggtacaagtgggacaagtacgtgaaccgccataactcggaagatatgctgtcccgtgaggcatacaaagccttgcccgaagcacagcagaagctctacaaaggagtgcgccaacgggaaatcatggtcttgttcaacatcgaccagaccactctgccgatggcggatgcggagaaataccgggatttgcaacaacgcttcggcagccgtgcagaccggggctacctgcaaagcgaggaacgacaactgcgcagcacggtgaaccggttcgtggcgcagatcagggaacacctgcttcccgtgcgcaaggatgccgcaggcatggcgcacttcgataccgccaaagatgcagtctatatgcccgaagcgaaacagtttgaacactacgaagactatgtgcaagaactgatgcgccaagtggcaggtgccaccggacacgcccaacggcttgcccgtgaaggcatggtgatgcaaggcggcaaagccccctcggaagatgccatacgctatgaacggctggtagcggaactggcctccggcgtgaagatgatggaactcggactgcctgcccggttagcgaacgacagcctgcccttggtggaacactggacacgggaactgcaagagaatccgcactacatagatgctatcgaaagcgatatgaacaatgcgctgggggttatccgaaaggcggaacagggtgagaaagtggaatatgccacgctgcgcacgcaacgccagacctcggaaatgcaggaacggcaagggccgcaggtggacgcccgtgagagtgccatactagtggatattctccgtaccggaggaatggcgatagacggacgcaacttcccttctcctgaagcccggaatgcgtttctggaaaaattcaatctgggttattacgaacggcagaagaacgaagccttgttgagggtgacggacaaagatgccgatgtggtggagatagcctataccgaagcactcgcctacggtgcgaagattgccacggcgtgccgggaatacctgcctacagaatggaacacgaaaggaaactaccggatagcagaggaactgaaaagcgtgcctgaccgctccaccaaagaaatggtggtggtgcgcgacagggagaccgggattgccgacgtggtactgcctgccggtgccaccacaggtggccacgtgatactgtccgctacggacagacgtccgttttacctgactcccgatgaggtaatgcctgcgcaggaacggtcggaacaacaggcaagggtcgtcaccaacaacctgcccggattctccaagcaacagataacgggcgcattgatgaagcaaggagcaagctatgtgcgcttcttcaacaaggacggcctgctggggtaccgtcccgatgacagttactttaaggacaaggaagtgtttaccgccaagctgaccggcaaggagttgcaagtgcaggcgacgcttgatgtggcggaggcggtagataaagccactaacgtacagtttgagcgcatacagatgttacgtgatgacaataaccgttgggcactctacttgaagcccgtagagggggaagccttcagcatctatcccgataaggaggacttaaaccgcttcttctccgccgtgaagcagaatgaacggcagtcggcacagggggtacgtatggaactggcgcagaaatattatgcgctcggcaccgaccgccccgaactaagacaggacttgttcggcacggcatctacggacgtggatgtatcgcttatcaagcgtgtgaatatcttccgggccaaagacgacaagttcctttgtgtgccgcaaatcgagggaatggggaaaattgaggctcgtgaggtgtcgaggctgcaatggcaacggctctggattgcggaggatatggccggatataagacacagttggcggccaccttgtttgcggacgtgctgaaacaggcacaggaagcgaaacaggcgaaaagccaagtggagacttcggaagtggagcatggaagggaaaaggaacaagtgaaggctgacggggcgaaaggacagacggactggaggaattttgaggagttgaaagccaaacaccccgatgccgtgcttctcttccgcagccgtgacttctatgaatcctacaaggaggatgcggacagaatggcaaacgtgctggggcttgacgtgtcggaacgtgacggagggattcacgtggcttcgtttcccaaaacggcattggacatttatttgcccaagctggtacggtcgggagtgagggtcggaatctgcgatgaactgcctcgtaagggagtgtccgaaatggacacccccgttgagaatgagcaacgtccggcacgacggatgtagtgtgtaacgtatgagagaaacatatacctatatataataatgagcaagaatcaagaatatgcagaacggtatgcgaattttgccatggtacagatgcgcaagtacggtattccggcttcggtgacgttggcacaaggtatactggaaagttccaacggacaaagccgactggcacagaaagagaataaccatttcggtatcaaggcgactgcggcatggatagagggtggcggcaaatacgggctgtatactgacgacaaaccggatgaaaaattttgcagctatgctacggtgggtgattcctacgagcatcattcccgcttcctgaaggagaacaagcggtatgcggattgcttcaaactggcggctgacgactacaagggctgggcgcaaggtctggaacgtgccgggtatgccaccggagggaactatgccgccaacctgcaacggattatcgaggtgaacggccttgacaagtatgaccgtatggtgttggaagcagggatttcgcaaggcaaggctgccacggagcactactccttcccgatggaaaggaatgagttcctgttggtgacttcccctttcgggatgcgtagagacccgatgaacccggacaaacagcagatacacaaaggcatcgatatccagacaaatcgggaggcggtgcttgccacggaggataaaggaaaagtggtggcggtcaatcaaaacgccgacacgccgggcggccgatccgtcacggtggagtatgaacgtgcggacaacagcaaggtacaggtaagctatcatcatctggaggcggtaggcgtaaaaacaggtgacacggtgaatgccgggcaacagcttggcgtgtcaggaagtaccggcacacggacaaccgaagaacacctgcatctggaagtgaagcaaattactacgaatggaaccctgcgtgaagtgaatcctgcggcttaccttgccgaaatagcacaaaaagggaacatcgggctgcaactgctttcggacggcaaagacttgatggctaaattccgtacgcaagaggacgaaactccggcaaccggtttggctgattcaccggaagattggatgaaaaagctgctttcctcggaggacagcggtatccggatgaacggtaacgacccgattatggagttggtgatggggatgtttacctcgctgatggctcttgccgtgcagattgacggcaaggaacaggagcagcaaatggcggctgcaacccaagcggccttggagaaacgcatcgacctgtcgcagctcgttccctcgctgaaatcctgtgagctggtgatacaagagagggtaagacctgtgctacacgccaaagacagtaccggcagctactcgcacgaactgagtgcagctgagatgaaccgattgtcgctgatactgaatgacacggcaatgccggacgagagcaagcagcaacggatcggtacggcggtaaatcatatgctcgtggctgaacgtgcagccagaagctatgagcagggcgtggagcaacgtgggcagccggaaggtttgcagattcgataataaatatagaaacgaaatagttgtgtaacaattaaaagtgtgatttatgattaagtgtaatgtgacaatcaacggcattgtaagccgcacggcttccatgcgtaccaacaaagaggggaaatcctacatcggctttgccgtgaaaacgaccattcctgccaaagcaggcggctgcaaacaagtggagatattcgtgtcgaaagacggaacggatgcggaactgccttcctatgtggtcgggcaacgtatcgggttgaagggagtgctgactttccgcaagcgtgaagaaaacctgtatttcaatttccatgccgagagcgtggactttctcccggaaaacgaacgtgatgcgattgaaggcactatcaagttccggggtacggtgggcaaacaggtagaggaaaagagagacaagaggggcaatccccactgggtattctctgccttcagcacggagaagcacgaggaaaacttttcctttacatgggtgcgcttcatctgttttaccgctgaaaaagatggttggctccaacctaaagcacgtatctgtgccaaaggagtgttggaactctccgtatatctggacaaaatcaacctctcctgccgggtggaggaaatgagggaatgggtgaaaccggctgtaaccggctgtaacgaatgaaactaaattttgagcatggcaggaaaaagatataatccggatggaccaagtgcagaggaacgtgcgcttgaacggtttacggaactgatgattttatgttgagttcaacataagatcattaatgtctgacatagaattatgttgggcattagtctaaacaattaataatcaatcgttctttgacattttgcacaacataattctatctttggagggattagagactatctaagaaggtcattaactccttatcctctgaccattttcgtgatggtgcatcagaaacggactgctcacattttttgagagcttctaatttcctctccatgctaatttcggcgtagatgttagttgtatcaatcgagctatgtcccatccaatttctaaccatatcaatatccgttccagaattaagtagatgagtggcggttgtatggcgtataacatgaggagatgggcgttttttagcaagagatggatgatttaagattacatcttgtgagtatttctttatcatttcataaatacagaatcgactcataggctgattgaatcggttaagaaaaaggtaatcgtcaggcaacttgttgtctataaatggcttgagtaaatcccagaaatcctcccatagaggacaatttctctctttacgccccttgccatgtaatgtcaccattggcattccacgttttgaaggcatcgcaacatccttcactttaacaccaataacttcagacactcgggcgccagtattatacatgaataagataatgacatgatcccgatttcttatcccttgatatttacatgttttcaatggtgcagcagccaaggcttcgatttcagatttgtccatataggttatcatgcgtttttctgttttctttgaagggataagattgacattgtgacaccaatctatatgttcaggagatttccacgccagaaactttgcgaaagcctttattgcagctaaacgattatttcttgaagaaacggtaatttttctctcaaattccagataatcaagaaattttgtaataacgtcagtcgtaatatccgagattttgagattatctattgcaatacttgttaatgtcgagacatacgataccaacatgcggaatgtatcacgataactcatctgagtgttacgactaaggttgcgagtgacaattaagtactctacgaggaatggtcttagccaatagccaagatgttctgtttcagcaatttttctatttttcattattcgtgtttttataagcataaaacaatttgtttgcttcctgcaataaagttggcgtctttgttagatagacggaagtgaaggacacgttaagatgccccaaataggtagacaacttcggcagtaaatcctgtacgttctttcctgatttataccagttagtaaggacgttgaccgcaaaagtatggcgaagatcatggattctaggctgatggcgtcctctatcagggaaataaagacctgcattcttacgaatggttgcaaatatctgatgtagagataccaaattaactggttttcctttcagatttatgaaaacgtatgactcctcttccattgggtacatttgagtccttcgccattgtaatatatcttgtatcaatcttgagacttgttcgttgaaagttaccaagcgtgacttgtagaacttactacaatgtatatgcacgtacatattatccatatcaatatcctcaatttttaaggataaggtctcacttattctgagtccaagcacatacgtgatcatcaagatatatcgtatacatattggctcattaacaagtggtctatatttgcgatatgtaagcgcacaatcaaatagtctcttcagttcgtcatccgtatatatgtaagcgggataatactctggagctttaggtagaaaaacgggaataggtatgttttgaatgagtcctctggaaaaagcccactcgaaaagtttcttcagaatgcagtgctgagaatgccaatatctggtgatgacatttccttttctgtaaaggaaggcattactatcactttccgttattgaagttaattctgttgtttctccaatgaacttagcaaatagtctcaaagagtaggttgtactctgatccttgcgaccaatagacgtacgaaacttgataaatgactcaacggtttcttttatactcatagaaactccccccagtttatatttgaaacatctctaagtgaattgagatccacttttgcatatactcttgtcgcttccatacttttgtgacctagtaaatcaccgacttcctttaaggtttgtcctttgtttatcaagaaagttgcatggctgtggcgtaaacaatggggtcccttgtgcctaacttccatttcactggatttcaaatacctatatacgacggaagctatggctgtacaagatataggacgtattggggctggtgtacaaaagaacaagttgtcgcttcctatgtcatttggccttccctgttttaggtaagcgataatagcttctcctacattatgtagaagtggtaatacttgtggtcgacaattctttgcatgcttaatataaatttgttctttacgccaattgatgtcgctaaccttcaagttcgcaacctcactacaacgtaaaccgtacatcgcaagtaacataaaaatagcatagtcgcgcgatgcggatttacctgtttgttcttttacggtttgtaacagtttttgaactttatcccacggcaagaaagaagggagattttcttcactgtatactttgggagtgattaaagctttgtctaggtcggcaacacaccaccccttttcgactgcataacgtagatatacacggacacaacacaggtactctttcagtgtattacgttgaaccttgttaaccgtgtagtattcaatgtatttatctatatcttccattgttaaagggtatgcctggttctccttttctattatcttgtaaaaataagtgagtatatctttccttcccttgatataggcatgagaatatctcctgtatgctaagtgattaaggtattcatttatgcgcattcctgatattgaaggagattctgattctggtagcatatgtagctctttaagccacatatttgcaaaataggtgaagaaactgtaattagacttggtaccttttttcttgtgagaacctttgtcttccaggttttgccatttttttgctgcatttgagatttcctcattggtaacagtacggaagttctctaaattaagatactctattagatgaagttggtactgtgcataaagctgaagtgtctttcttttaaaaccttttgatttgcaatccatcaagaaagacattctctcattataaaagggagcagcaatcagtctgactttgtgccatttgcgttctgcgagataattgaccatttcatcttgataacgaaaatctaaaaggcctacgtattgtaagaaatcaaccgccatctcaataaatttgattcgcgaggaagggcaatcatgatgtttccgagaatgataatgaccagaaatgggtgaagaccatagacgtgctgcttcaacgacatcatcaagagatacaattctcttttttccatcatgaagatcgaaatattggataaacttgagcgaatacccagcccaacccaatagtgttagccgggacaacccttccttacttttcatagtcagaaaggattctcgctcctttaataatggtgcagccaaatgttttttaaggaatggcttgcggataataatttgttctaacatgctcttataattatgtgagtaatacaatataatataacgagcatctataattatgttgtgcaaaactcgacaagaactctaattatcaagtaaatatgaaagaaactgacataaataaatgggtaacattaatgataaagaaaatatcgtctatcaagggagactggaagaaaccgtggtttaccgagaactttatggcatggccgaagaacctgtccggacgagaatataacgggatgaatgcgctgatgctcatgttgctttgcgaggaaaacaactacaagctaccggtgttctgtacctttcagcgtgtgtcgggactgaactattcgacggacagacaggggaatcataagccattgacggatgccaatggggagaggcttccgcaggtgtctgtcctgaagggggaaaaatcgtttccggtattcattaccacgtttaccgtggtggataaggagacgaaagagaaaatcaagatggaggactatcggaaactgtcgccggaagaacagaaaaagtattcggtatatcccaagctgaacgtacataatgtattcaatgtggcacaaaccaacctccgagaagcacgtccggaactatatgagaagctatgtgaacggaacaacttaaaacgcccagcctccctggacgatgaaaaaatggcgtttgccccattggatgagatgattgaaaaaaaactgtgggtgtgtccgatttctttggaacatcaggatagtgcttattacagcattgccaaagatgcgattgtgctgccggaaaagagccagttcatcaacggggaatcgttttacgggacgctactgcatgaaatgacgcacagtacgggggctgaaggacgcttagaccgtatcaagccagccgctttcggaagccaagagtatgcccgtgaggaactggtggctgaattgggcagtgctttggtagcctcgcagtatggtattaccaagacaatcaaggaggatagcgcacagtatctcggttcctggctggatgtattaaaggaatccccagagtttctgaaaaccacattgtttgatgtaaaaaaggcttcatcgatgattgcacaacggattgatgcggtggctgagaagattgaggcaaaagcccggccgttctattgctctgtggcatttcttcaatctcaggatgatacggcaagattggatgcattcaaagataaaggagactttgaggggctactgaatgaagccacggaatattatgacgggaatggcatggatgagatgtatacttacagatatccggcacagcatgcgcatgataacgtgctcattgaaaatgagaaatgggcattggtctataacggaagtgtcggaggaacttatgacctgatgttgaaatatagcgaagaagaggtacgtgaccacatccgtcgctatggtatcggaagggcatctgaagatgtcaagaatttcgcaaaggatatggtagcaaaagaatacctttcaacagtaaaagtacgttcgccgaagttcgagatgcctaccggtgacattctatgcgcttactataacagattgtctgatacactggatgtagggacagtcgtaaacggtaaatttacggaaaggcacagctttgcctatgaccatgacaaagaccttaccgacaacctgcaaaatgtccggacggctttggaagcaatgcccgaatatcagtaccggggcgatgttgccggcgaaagggtaaatcctcaaatagacctcatggatgcggataatgatggcaacacgcaggaggtggcacatgaggaaagggaacaggaggatgagtatgtgccttatcggaggggaagataagatgttgagtgcaaggagtgtatgggcacattccttgcactgctctttttattcttctatgagcgttaattgctccggacggtcggcaaaccaataggcatcgctgtcaatatatacgcatctgccattgactggctttccaaaagccaacacttcgtggggaccgaatactactccgtggtcgttggtgaagataaccctgtcaccgacggataaatcccggtctgtgtaggtgacttcggaaagtcggtcgtagaatatcgtaccttccgcttcataccgggctttccaacgctggaaatcctctttatgactcatggtcatgccaaaggggaataactcggaggggaaaacttcggcttccgaatggtcggaggcaatcaggataatgctatcttcgtcaatttccttgggggcggaaatcactttgtaagctcctgaagccttgccgttgtcggggtcgttccaataaaggatgttgccgttcttgataaaatcgtacttgctcattgtgtataattatttagttgaaaatcaatataaagcattcttgtgttgccacttctaaaccacatttttttgtcctgcaattttccagccataaactgctgccacatcgggatatagggaacgtgtcagtttgcggaaacctctttcgtctatctcaccgttgtaaatcttggctgctatacgttcggctgtttcttcgtctttggctatgcggtaaagcacatagttggtgccatcatggtggtgcagtattccacgtatgttgtaggcatcgccgtaccattcggcatcctcgcatcgggtatgaagtatgttggcaatgttgttaccaaaaaattgaaaggcatttcttctgccttgccatagccctaaatcggcaaacgcaataataatgccatttacctttttatcaaggttgcctctttcatcggacagacctaaatacacttcgtctgcccattcttcatcagtgagttggtaatccttattttccgtaatggcacgcatattttccaaatagttttcacgcgcttcatcatcataaagcatttcgctgctccaaatcattttcttttccattgtcttactctttaaattgttggttatgcactttccctttcattagagaatttttatctctaccaggagttctatttttacgtgcaatcccataacggcttgtcaggcaaaataaaggcaaggaatttggggattttgatgccgggcttggaaagcctattaaaatattcaaataacggagtggtacttgacggattttgcgagccgtaactttgcagagtaaaaaggaaggcttggtagatgggaatggcggattgagctaaaagaggttaatttgctgaatttatggctatgattacaaaataaatctcatacaagtttgttttctcaaataaaaaatgtacatttgcagtataaaattatcccccttggttgggaaagaccaaggctcgccctcgatttcgagggcttattttttatatgactatggcagaaaaaaacaagcaacgagtaatcatttacattgacggattcaacttctattatggattaaagaccgctccgtggaagaagtattattggctagatattgtcaagttgatggagtctttcttacgtcctaatcaggaattaatagcagtaaagtatttctctgctagaccgacagacgtaggtaaacggaaaagacaggatgcctttttccaagccaataaggagaatccgaaatttaagttgatattgggaaagtatctaaaaaaggaaatcgagtgtttcaaatgccacaatatcatccatacttacgaagaaaaggagtctgacgtgcgtatagctacccagattgtggccgacgctttccaacataactgtgaccttgctatcattgtttccgcagacagtgatatgataccagccgttgaactggccaaagaagctaaaatcaatgtatttatctatttcccacctcatcagtattctagtaacttggctacaatgggaaatggagcacccattcagatgttgcgctatgaaaagaggtttaagcaggcattattgccagataaaataacgcttgccaatggatttgaactttccattccaacggaatggaaagttttacaaagaggagaaaaataacatctcattgctattcaaggcagggatagagatacagtttttttataataattggattcaataaatggcagtattatttgacagtttttcatataggataaaggaagtcgaatctggtatatgttatgatagatggcattttggaaaatatccagaacttactatgcctgaacatttatattatttgaatcgagttataaattgtttgctaacacatgataaaatcattatcaggacagattcattggaagaaattatagacgttttgggttttgaagcctttagacttttatatgaaaggcaagaacttgtaataattgataattggtggtttccagcattcatgataggaaatgaaaatttgctatttatgaatatgcataagagtaattattatgataaagttattgaacgaataaataacaaatatggttttcaggcatctttatttatcaagcaagtatttgaaaaggtaacttctgattcagaatcggaagaatatgtatattgggatcatattgcccaagaaaatatgtatgaggatttcacaatcaataatcaaattagaacctatttaaatatagaatctgaaaacatccttgacattaacgaaaaagacacatggagtgccgtaagattatgcctattcgaaagaagtattgtgtggggtagttatttacagactgatgaaataattttagaagatgaagctaagtattatttcatgcagaaaaacaatctaattccagaacaaactcttaatgatagaatgaacaaatatctttttgcaaggaatattcccaacttatctttgctttattacaataaaataattgatataaaaaaaattattcaagtaagagatcatgcttttggaggtttttatagagattggctacaatcgaataactataatataaatgaactggagcgaatccttttaggaggtaactcatcttcacaagcagaaaaatggtttagatggggactggtttctgttacaggactaatccttccggctgtgggtggattagctgtcagtttactaaatgaaaaaattccatcattctcccaaaagattccaaatattttcttcgatcatgtattatctcaagtttttaatactagaaaaaacaggaatgctttgcttgctttgaaatgacattagtttgtcgaaattttcaataattcacttgattgttttttcccactactaaataaggctacaaatatttggtaatttcatttgagtggatgtttacaaataaagttgattaaaaaaatcactatattatttttatctttatttcaaaaattagccggctgaccttcacaggctaaccgactatcacacaatataagttttttattatgaacaaaaagtaatcctcattttgggggagaaagcaatcttacacaagcgttcctgtttgcctcattgggtgaataatcgtcaatccccccttctgaaacaatttcaatacggttgcttggcacggcacgtttgataagctgggccttgatgtattccgcacggcaaagccccaatgaattgttgagcgtttcattacccgtggcattgtctgccgctcctgaaacccggatatgcaacctatgcttattggcaatccgggctatcccgtcaaggttgatgagttgcgaggtatcagtcagatggccggtattcaggacaaagaagaaatagataggtgccccgacatacaggctgtcggaaacaagctgtgaggcatcactatctaaatggtgggtatgctgtctttgtgaaacaatttgctcattggtatgtgccgccggatgagcggaagatgtagagtcgcttgcctccgtcaagggtgattgattcaaccttgcgcgaagcgaatttaatccgctgtaattgtttctcggatagccggaagaagcggtttggctttctgcgttgccgacaagttcggacagcttatcagcgtatcggtctaacagaccttccaactccagaatcttcttcaactcggcgataatggccaggttcatggcattgtttttctgtaatccccggttcttccctgccaaacacaaggcatgaacagccagttcctcattctgtcttatataaggaacagggtctatcaccttccgccaaccgaccttgccaatcgtaaaggagattcctgccgtcaggcccactaaattatccccgaattggtctgaagcaccataaccgtcgaagtccttgaaagtcgtggtgccacccagttccgcaagcaagtggaaacggtctgtaagacggtatctgccctgtatgccgtaggaaagagcaaacggatggtggccgctccccttgtggtgaatgataccggctcccgcataagggatgagactccaacggcacggtgtattgcccctatccaagcctgccaatacattccaaagcaaatccgcatggcagaattgatatgattgtgtttccaaccgtgaatccttgaatcggaaaccctgataggacaagcgacctcctatagctggcgtgaaccatttgcctgccgaaacagccaatgtaggcttcatcctgccaaataaatcttcacaccctaatggtgaacccaagaaagcggaagtaccgccggaaacattcaggaaccagttatctttccacgtggagacggaaacgacatcggtcaggtaagaaggctgtaccgtttcccacttctccttgaaatactctctgtgacgggtacacaccgtatcggctatattcacattgtaagcctgtgctcccatcgaaaatgccattggcaacataaacaaaaatattctcttcattctatctaaaatttggtttgtgatacaaagaaacaacgtgaccgatctatgcctgaacgtatggaagcctatcacgccgtctttaacaagtattcttttttacttctcccaatcagactgtcaatcagacttcatggagagtgaatttctcttattttttacggacgctctttccaccggcaggcttcatcatccggtgtgccctctgcaagcaacgccttgcccatgtccggtcgtcctcgtcctccttccttctccagggcaggtcgcttccccctccgccacctccatgcccttcggcaaaggtggtggccaaatcgacataattggcgaaaaggtaaatggcgcacttgaatatatcttcgccacgttcggccatgtccttaatcaatgaatcatcgaacacgctttgcgcctctttccccaaactttggaaatgcgtcctgaactcccggatgatgtcaccgaccatggcttccgccaatctgtatcggacctggttctccagattataagtagctagtctcacttcctccctgtaactctccaccttgtctttcgattcggcctccagtgttttcaactccgacaatttgcagtcggcttccgccaatttctcccgtttgtcggacaggttttcaagtactttctgaagctcataatcaagcttagcgatgcgtttctggagttcttcggaatcccctttgcccgtcctcaaatcagtggccactgttctgatttcttcctccaattccagtttcttttgttcctgattggcaatcatggtagataatcctttcactcttttttctgccagacggatgtccgaatggagttgtcgaagcagctcacggtcgttcccaatctgtttctccagcgcggtacattcacggctcaacgcacgcctgtattcttccgttgtgcggtgcttggtgccggtcacgctcacgctgtctccacggttcaatccccacttcccattgactttggcaagctcgtcgtggagtgcgaacagacgctctttgaagtcatagatatttcctccgaaaatcttgttgaacgaaatcttattccgttcatctaccggtatcacggtgcaatgcacgtgtgggttgagttcgtcaaggtgtacatagaagcctatgacattatcctccccccatttgtcacacgcaaacctgtacacgtcctgcgcccaaagttctatatccttgttgcgccggatatgtgagttatcggctccatgcgtgaggtttactttctggccgccaaaggctatctcgtgcatcctctccctggagcctccaaagatgatattcgccacagtacggaacttcggttcggtaagcccggcgttggggtctttgatactacgctcacgcaaggtttccgccatgcgatccggtatggatttggacttatccaccggaacaaccttacctcctttgatgacttcaaagttaagccgttcacgggtgcggtcatagttgccgtgcttcgatgcccattcccaacctctttccgtccagttgcgctgatgctcgtcgctttgaccggtggtcatgccctttccgggcctgatgtccataacctgtttgatgttgttcgccatgtgtcctatatgctatttttacagcttgctgccgcctttgcggtctctgcattttgcccgtccggggcaaagtgcgtattaggctacgtgctggaagcacttccttccggacgggcaagcccggcgtaaaactggaggtcaagacctcgcatgagggttacgcttccgcaagtggaaataagggcatacccggtgagtctaaaaggagaggcagcaagcagggttctattggttggtttggggtattttcccagccttctcttgattgattccctcaaaatagggagcgtagtattcccaaagcaggcggaggtcttctgaaaccttgtctggtatcaaggctaataaatattccggaactttcgggcattgtacgtcaatcaggttcagacctgccgatgcgagtagttgaaggtatattgccacatccctgtggcaaacctcgcagtacactctctccaatgtggcggaaagcgttggattggccggaaacaagttcgtcctttgcaggattatatgggcgaacagcttatgcaagcgttccccgatgccggctccgctatctgtcaccggcatggatagaacatgttcggtagttgtgatgaactgtacagccgattcagccatttcctccaggcacaggtaaccacatatccacttattgatgcgttcttcctccggtgacatcatacggggctgcaagccttccgttcccggcaacgtgtaattcattgttatcaggaaaaacttcttgtgtgcgtctatcctcgccatgccgaatttctccaacgcatcgaggaaactgcgcgtcgtggcacggtgccatttccattgccgggcaaggttgctgacggtcgtgacgaattgccctttccgcaaggtgacgttcgttccgaaataggtcaggctgtcacggctttcaccggatgccttgtcgagtaagtcacagagggcatccattttggagaatctttcttcttcatccgaacggaggaactcaagcagttccttgtccgcaattattctgtaattgatgtattccttcttcatgaatttatgatgattatatagtcttcgaacggtaataaaagcagggaaaacattatcatttcttcctatacccccagtttcgataatgcggaatgatactttcaggattctctaaaaacgattgtcttaaaaagggcttctttaccatgcggcaaaccgacaatgaggggtaaaacgccgccccgaaaatcagtgcgccaatggtaacgccaagcgacaggaagtgaggggtaaacaggcagacaacagagaataccgccactccgagaagtgtccgctcctgctgcaaaaagcggaatacccgttctgaaatccgatgggagaacagcaacaggcataccacggacgagggggccagttccaacggtagcttgaacaaagagaggtggtagaagtggaacatgagcagggttgaaagcaataccagcctgtaacacttgcggaagttatggctgaatgccatacgcaggtagaacttagtcatggacggtttggacttctttctgtgataaaagaaaggaagcactaaaaacgtgagtagaaaaagcagataaagggattttacaatcatggttatctatgtcttagggttctaattcgagtttaatgaaatgattggaagcaatacggacaatatcttccacatcagtatatagcaatgcttccgattggtagcgtaacttgaaatcgggattgcgtttcaatgaacgcacggcactgtccaatttgtattccggtatgctcaatacatggcctttgggatagacgctgttcgggactttcgccaccaagtacaggacacggcaatgcaccggatgcaactctccacccttctggacggagaacgtgctttccctgtctgcatccagcacatcaatccatgtcctgtaatcatggatgacggataccagttttctataaatactctctttcattcagataaaatctcttaacagttcttcctcactccgcgcaaacaacatatggccgttcttgatgaccttcagcagttcttcccgaagttcgcagcccattatctccagagaatcatagagggtcacatacagggtatcacattcaatgtttccgtttgccgtggcattgagcttatacatccggccgaaacgtggattggaataggcacaacatttctggccgaaatccgtggacgtggatggcaggtagtgatagagcaatatgagttccatttgatcctccagttcatcaatcagttcttccaatgggtacacctttggcaagaggaaggtcagcacggcactgtcctcataaatctccgcttcttgaaatttccccggagaaatcaatgccggcatttccagacctgccagcgtgacgaaccggtctatttgttctttctgcatgatatattgttttgatattagttgatattcgtgatgtatgccttgataagaagtgcaggcaactcgtccacctccaacgggaagtcggagtgcttcaacttcctggttgctttggaagtctctttggccaacctgtgaagtgcatcggtttgttgcacggacaacagcgtataggatagttcatcgaaggaaatccacggttgaaccaatatccaaagatatgccgttaagcggttactgtcggctatgtacctgttacgttgtatctcgtccaaacaaacgagggcattttgcagcaaacggcggttgttgcgtaccgtcaggaggataaccagttcttccttgtggaatagaggctgctccttcatggagaggtctatgatatgccgtatcacttttccggtctgggtcgtgatgtcgtccagtggaatatccccataggcaggaagatgttccagaaaggaacggaatgccatatcttcctcttgcaaaaaggtgataatgtccgctttggattgaaagccgtcttttaatgtccggccgagcatcttctgatactggactacggtctgttcagcgttcgtgccgtaggtcggaacgctgtccagacctgcataaaatcggtgtgcggaagctaccaatggcagggaaaacgtatcgacttccactctattcagtgactctatgattgtgaggtaatccgtaaaagcccactgccgtttgtcaatcagcctgcccatataaaaacgtagggaatcatggatgatttccagtccggccgatgcatgggctgtaagactgtcacggataatacaacttgccacggaatcatccaacgcataccatttccgtactaattccacaagtctgccggtggtaatattttccgtattttttactttttgtaaaaagtctgcataggcatcgaaaacttcttcggaagaatggaagccatgttccgcagaacgattgcaagaagccaacaggattatggccaacaaagccacccatgtcgtgtgtaaaagaggacggtcacctttgaataacaggcggccaatgcccagatggaaacaagatgattgtctccgtgtctgtcgtacagacaatgtttttgtcactaaatgcaatttcatatcggactttagctttgtgatttcaagaagcaaaaataaggtgtaatatccatataataagtatgtaaaatgcaagtttacaaaagcttatggaattatactccgagtctgatttttgcaactttgtgtaaatcaaccaacggataacaaatagcacaaaaaacatttttcaagctatccggtaaaagagaggaagaatacatagaaatactttcaaaaaagagtggcaacatggcaaacaatctgtctgacacgctatggaacctcgatatgaaatgataaaaaaggttgtccgagctgccatttatgcggctttgtgaggtatttgttatacctttgtacttaaataaattaggaacgaataaatatgtcgaaggtaggatatgtaataaattatgccgggtatggtacggacgtggataaagaatggatgaagcgtttcggctgtacggagattatggaagaaaagcaagagtgtggcccgttacgtgcagaatggaacaaattgcttagacggctaaataaaggggatgaactggttgttcccaaattgagctatatcatccgtgagacacggcagctttcgtatctccttgaatattgccgtctgaagaaaatccggctcatatctatccatgactgcatagactccggcaacgagctttttccagagacacagatgtcggatatactcaatgtcgtggcattgctgcccaaagaagcgtttgatgtccgcaaatcctctgatgcaatccgaaaggtgaaaagccgcatgagaacattgtccccggtggattataaccgcatcgagcggaaagagtgcgtggtgaatatgtataaaagcggccaccttatcaatgagatatggaaagcaagtggcttcaggagccggagttccgtgttccgggtgctgaaagaagccgggataacattgaacagagggcgtaaaaaaggataagcctttatgtagttaaaagggggctaaggtgcaatgatacagcatggatgggatttatctcccccatccatgctgccatttcgtagtacggcttttattcaataacccgaatacgtctgttataataaacacccttgaatgcttttacaacagtatcatagacttcatcgcacgatacggcatcaaagcaaagctccatcgtccagaaatcaaattgaaattccaccaatgttcccgaataacggtctgacgtattgtaaatggtcacggacatataatcgaccgttccgctttgcaattccacccaatgcccataataggaaaacgagtcattgtttgactggctgttaagggtgattttgtttatcaatctgcttatgaaattatatttctttttcattgcggtatctgttcatctattcccaccgtgaagccttgtccgtcctcattcataaattcataaagcctttcaaagtcatgcttgacctctccatggcggaagtttttcatgcactcttgaatttcaacttccattgcggctttggctttctccaaagtgctgtaaagcgtatggcaatcggaaacgctttcaccgcaatcaactaatgtataaagtatgtggatggtgttcgttttcatttttgtaaaccagttagatgtgaggtatatatcgttcgttctctgctaaaaactctataattgctttagcctcttcgtgcgaagccctgttacggtcatcgtatcggcgttcttcgtcagccatgaccttcagacatttccggattaatcggtacagcagttgttggatggtcgggtgcatgaatgggatggaagcagcaaatacggaatggttgaaactataattattcaacatattctctacttcttttgcaaattggtactccttggttgcttggatgttcggaattttttccattgtcttttatgttttaatgggttacacatatctttccctgtcttcggcttctttctgtcctgccggttcggaatttatgctgcggtttccaatcatcggccaggcttataggtacggtcttttttgccaattactcttgcatgacaaggaagaatttgcaaaaaatacatttcagaccagagtgttaagccacgatgatagacctttgcagcccaaaatctgagcggtgcggacagattggattccgaaaatgcttgatgagtataaaaggaataataggttggtttaaaagggagcgatttgctttcgggtgggtcggataagagtctgtctggcaaacaagaaggtgacttttcatatcttgggctataccgaaggtacaggacaaaataggacgtgtcaccgtttgcccatgccataacctgccttcccatattttgtatggtaaggttggctgtggcacagacattccactgatatgggtggggaaagcaaaccgataaaagaggaagtccaaatgatataaaaggaagtccgacaatcccttgtggttctaaaaaaggtagttggtctaagcatattataataggaaagccggggaagcaaaccttatttggctcactacccccagccctgcatattcacacttgctaatcaaaccagtcgggattatctgctttgagttgggttatcaacccgctatcatccgttgtcattttacataatgttaccagggttaaagaaagtaagtagtgggcggattgctccacccttgctacttatttaggctgctacttcggattgttgtttctctatgggttggggaactccttcaggctgaggatgcccggcatcttctatctgctccaacaaagcgattttcttttcttcaatgcgtttatggcgtttatcgtacacttcattgtacttgtttgtgatgtctgccaattcttcgggcatatgttttttggcaaagtcaagcaggagtgcagccgtgccattgtttctgaaagcatccttgaaattagcaatcaagaaatccctgcggataatagctttcgtttttgttgtaagattggctatgacgttcatcttttcttcatctttcagataatcacattctttgtcaatgccaacggctgcataattttccttacggagaaaggacaacaagaagaaatacatcatcctatcttcatcagcaccaaattttgtctccgttgtatcaatctcctttatcaccctttttacatcatctactgtgttctcagtggcgatttccttgttacgcttgtctttcttttccaattccgctatttgtgtggctattgtttgcgtaaccttgtcactttccgctatttgggctgcggtcttttccacataacagagtgtgatgtcagcctgcccaatcttggcataaagtgtaatctctccggcttcgccctgcctgctgatttcattgcatatctccatatagtctgcttgttcttcctcgtaatcctttagtgcttcctcgtaatcttcggagttatcgtaatctccgatttgtggttctatcggatttttaggaaaagctatgcaactatttattgtttcaacgtcatagcccgaagcgatgagacgttcaaccgtggttgcattagtgcaatatgggtcacggcaaaggattatatcgggctgttgttgcgcaatctgaatggctttctctttcagaaaggctgcattcatttctgcaagacaagtgcggttagagcattgcccacaaccaccgtcattgaatagcaaaaggttattggtgttataccggcaagaagcacattcggttttgtcgaagctgtaacgctctaagtctatggtaaatttctgctcgataagttctgctatctctttggcttttcgacctctccaactggaatagtgctggatgccttctttgaggtagttctcgtacacctcacgctgcacatcttccccatatcggcagatttcagaagctacgctgatagtgataatatctgcatccaacaattcggcaagttcgggaatgagggtagagaaattcaatcgggtacggatatagttctcactcttgccgaaaagtacagacaaggtttccaccgtatgccgtccgctatcaataagttgcttgtaggcgttggcttcttccgtgggagtaacgtctttacgctgcaagttctccgtgaccgccatttcctgcgcttcttcgtctgaaagttcggatatgattgcaggaactttttccaaacctgcgataacggtagcacggtatctgcgttcgccaaagacaatctcgtaacggtctgtgtctgcaatagggcgcacagtgataggttgcaatacgccttgttgcttgatgctttctgaaagttcgtccagacctgtttcatcgaaacgcttgcgagggttgtagttactcggctgaatgtttgccactgacactaacgtgatgtttctttctgctgttgattgattagctgttgtcataatttttgtaattttaaaagtttgatattatgtgaatatttgtttttcccctttcatcggtttctttttgtcgaaaccgttttggagttttacaatgccacacacagctatcggtatagcttcatgcggcggcttttcttgccaattacactccgaaggaggaagaatttgcaagaaattcatttcaagctggcggcatcaagtgcgatagcagacctttgcattaggaaaacccaatcggtgccggcttaaaaagtgactggaagaaaggttaagggaaaggatgggtagaaaaggattgtgaagtctctgtatataactaggtatgtggagaatggtataaagggagggataaaacctataaaggtctccggcttgggtgggtagaataatcagggcttgccggacaaacaaaaagtggctttttcccgaactccatgcagagacaactcgacgattgtcgaagtccctgcatggagtaccggaatgtgccgccgtttgtcctgcctctccccgtgtctgagcgaagtgaaaactcagggagaggacaagccttatacctatgaaaaatccgggtggggaagctggtggaagctatgcttattataaaaggtatggtcgcaatgaggtattactcattgagttgttataaaagggaacgatggcttgtaatgtgccaccgcatcatagaagaaattccctttgccttgtctcacgacaaaacaaagggaatggttaaaatatactgtataaattaagctgcgattactgtcacggcaggttgttgctccaactctttcaaggagttatcaatcttccgctgcaactccttgcactcctgtttcagtgcatccagttcggcggtcttgccccacttgcggctgaaaatctgctgcaaggtcgggagttcatttgccagttggtcaatcttttcctgttggcgtcttatcagttccggcaacttgtcaagggtggcttgcggataggctgcggaatcggcaaagcccaatggcaatgcaccggacaaaccgcatttgtatttcaagccgcttttaccttccaccaagaatatgttgcgttcaaaagcaccggtatagtggtattcgctgcggacggacaggttcagcccgatgtagctgccaatggtgccgatggcttcgctcctgtaagtcttggctatcttatgcaactcacgtccggtttcttccgctgtggcttgttgcaggttcagaagcaaggttttccgttcgcctttgtattctttataatatgcccaatcctcggacatccgttgtttggttagcatggtttcctctatatcctgctcagttttggcaatcttgcgctcagcacggtatctttccttgttgaaaatggcctgctctttctccaactgcataatccggttgtcaagctttgccttgttcaacaaatccatattgccggaaaggactgcaacgaactcggcgaagttcatgcctgtgttctcgtccatgctgtcctcgtcaatcctgcgcacggctatcgtgccgttgtttatctgattgataaacagttgcttgtttcgtaacaggttgaatttgtaggcatccagcgttttctccgtgccgtaaatgataatatccacgacattgccaccccaaaacttcacggtattgcctttgcggacggcacgcccgttgcgctgctccaaatctgccgggcgccagggtacctccaaatgatgcaccgccacggctcgctgctgcgcattgacacctgtacccaacatggaagtagagccgaacaatacccggacagtgccgttgttcatgtcggtaaacagtttcttacgttcctgttcggtcttggcagtctgtataaaccgtatctcatttgccggaatacccattgtcactaacttatctttgatgtcctggtagatgttccactcattagacttgtacgtgcttaagtcactgaacacgaactgcgtacctttgttagatttggaacgtacataatagtcgtagatagtggccgcacaccgagaagccttgttatccggatcgtcagagaacttatcacccaacaggcgcatatccaaagccattttccgtgccacattggtagccaccagcattttagccatatccagattgtcgggctgcggaatgtcaagccccaaatcatcccaattaccgctaccggcgaacgacaccagacgtccaatcatttcctcttgggcaatggtaggcttgtcggagagaaaacgtatattcttctgcggcacgtcaaggtttatcatttcagccgtgcgataatcggttatctcacgcaggaaggtcgccagttcaggaatcttgatatacgtgcgaaaacgctctttgcgcttgattgagccggtgatgttcaactcatagtcggttgtctttttcgtgaaaatagccgcccaagcgtcaaagcaacttatacattggcgtgacaactctttcggccgcaagtatttgaacaacacatacaattcggtcagcgcatttaccaccaccgtgccggaaaggaacgtggcacccaaatccctgcccgtccgttgctgtatgtcacgaatggcgacaagcaggttcatggcacgttgcgagccttgtgtattaccaatcccggcaacccttgtgtggcgtgtctggaacatcagatttttaaaatagtggcattcatcgacaaagatgtggtcgatgcccatagcatgaaaatcaacgcaatcatcctttttctcgccaagtttctcttttaaggcttccaagttggcgttgaggttcttctgccgtttctccaaacctttctgtaaccttttgttgttatcagccataccgctgtcctccaacacttccaaagagcgttccacgtcttgaagttcctgctcgcatatctccagcatggtctgctcggattgcggtatcttggaaaactggtcgtgcgtgagaatgatgcaatcccagttgttattcttgattttagagaacaattcctgtcggttggcaggtgtgaagtcctcttttcccggataaagaagttttgcggtcggatatgccttgcggaaacagtccgcaatctcgtgtacgttggctttcaagccgataatgagcggcttctgtgtcatgcccaaacgcttcatttcataagccgccacacacattaccattgtcttgcctgcaccgactgcgtgccagcatacgccaccgccattctgcttaatcatccagattgcatccttttgtgagggatagaggtcatcgtatgggaactgctcaaaagagaggttggggaatgtctgtaccgaaccgtcataatgaggacggacgtagcaattaaagcgttcgttatacaggcgtaccaattcatcacgcacggcgataggttggcaatccaaccattcgttgaacttgcggcgtatctcctgtatcttcgtggatgccgcttgtatggcttcttcatcgggtacacggatactttcaccgttgcgcattatctctttggtgatttccggaaccgtatcgtgcagggcgtggacgaacagggcttccccactatagcttccaatcgaatagacattataggcaatgggggaatggccttgcaaagagacaatataggtgtcattcacatcaaaatacatcactgttgtgtttaccccgaacaggtctttggcaaaggaagcgtaaatacttgccggaatccaacgctcacccatattgaagtcaagttcttcatacggaataagttcgggggtagcatcttccaaagcctcgacagatgtagccgcccatttttgagcgttgcctgtcaggtcagcaagaacagtacatatctccttacatttctccacgacattacctgcaaggaatttgcctttgttctcccaacaatccgtcaaaggattgtagaatatctcaccggcaagggcttctgtcagttctgtttcggtctgtccggttgtctgtacaagatagtccatattgaccgaaccgtaatagttaaggctgcttgccaatgcttctaccggtgtcagttgaatggaagtatctattttcttgaatgcaacaggctcgtgcatgatgtcggctttacagatatcctttccgagttgcatttcaatcgtgaatacttccatgcccagactatcccaagagaaaaactccttgttgtcgttgtggtggaaaaagccccacttgcgcacataagtatcatagtgtttgttgagttgttcccttagcttcggatattcggccagttcctcgctttctttggttgtcagttcaaagtaggcttcacggataggaaaataatcgttggcacgctctatgtttattcgggagacttttaaaggtacgaatgtaacggtcatgtcggaaaaacagtttgcctgtttgtagcggagtgtgccaagttggttttcaaagagtaccaacgtgccgtttttcatccacttatgcaacgtgcctgtgtacgtgcgtttttccctgttgggttgtgccgccttgttggtattaaagcaatcaaaaagagacatttgtatgccgccaatgcctttgttcggtgtggcaaacaggttctttctgaaaaaacgctcaaagtcggctttcagcatggaggaaagggtttgttgcaaatcggcttcctctccctgccagcggtatttgcgcacatattccccatattggttggtttgtatgcgactttctgtaaacaaggcggtttttggtaaagtaaacaatttattggcatgtccggtatattggtcactacccggcacgatttctcgggttgtttccatgaacagcttttcacggtctgtaagcgttaccttacggccgctcttttggaatatcaacaggtcgctgcctacttcaatgccgcttgtctgcatgaacaggctatcaggcaaacgtaatgccgtaatcagattgcaacggtgtacaagatagtcacgcacgaattggttgccttgtgtgtcagcgatacctcttgatgtgacgaaagccaatatgccgccctcgttcagtttctcaacggctttcacgaagaaatagttatggatggtcttggaagcctgtgcatagatgccgccttttttgctaaaagtattgtcgaacacacggaagtcgccaaacggtatgttggaagcgattacgtcaaagcggttgtgttccgtctcttggctgtcaatcgtttcaaatccttcgatgaatacctgtgtgtcgggatgcagggcggacaatacaagtccggtaagcaggtctttctcaaaagccgtccgatgtgtagccatatctccgactggtaggaaaccgccgataccggcggacggttctaagaatgtgcccattttaaggtcgtttgccgtgaaagtgtctttgatttgcttggctacggcttgaataaggaatgtcggggtataaaaagctgtcaatacggacgatttcagactttgcaggagttgcctgtaaagtgtttcattcccttttgccgcttttgacaggacggagagcaagcgtttaacggcttcctgcatggtgtcgggtatgggggtgcccgttccgatactcaatacttccttgatacctccgcagcctgtaaacttggataatgtctcacgctctgcggtggtcgcatttctgcgtttctcgtgaatggcaagggctgtgcttatcgcttcgatattgccctctaatgcttttaacttgttgtaactcatacgtgtatatttaaccttttgtttaatatttccctttcttcgggctggttgttgcaacctgccgggaattatttttctgccccgaaaaggtgacggggaaatacgggcaaatctgacgagggaaatacgctcgaacttgtgagaggaagatttcgtgaaggcatccacggcacagccggatttgacaagtcttgacaccggacgttacctttgcggaaaaataaatccgggccgggtggaatcacgctcaaaaaggcaatcttgattgtcacgttattagaggatagggagagtttataaaaggagccatttcgggtaaaagtggaagggaagccgctcttggagcggatggtaaaaaagggaatgagtggattataacaggaaattgaggcgcagggctgaccaaaagaaaaggctctgtgcaaatcatacacaaaaccttttcattgattaaaacagattgacaaccggcatacctcgctgcttggctcttttgaaagtgtagtatgtgccacctttgggaactccgtcaaagtaggctatcaagtggccggaacatgacagcatatagtcgtttctccgaaggaaacagtcatcagcatagctttctgcaagtatgacaacttcatccgctttggcaagagcattacgatagcgttccttattataaggtgtgaatttttcacattgcccacgataaggcacggttgcaaccaatgtaatgtcggaatatacttctttcatggataaagccgtttctgcggcaagcaggtcgaagcccatcgccatgccacagtaaaatatgcggatgcctcgattgtaatgtgccaatatcactgtccttaatgctttccgaagcgaaggtactttatcgtagggtatggaacggtggccggtaagtgccactgccattacttgattatgtgaattggtttgtttcattgtacactcaataggtagttttaatactctttgattgattctatatattctcttgccagttcttctaccgcagcatacgggtcttttttatctgcaatatctttcacatgaaccatgaaattgtctatttctcatatacaattttcatcggtatatacttggcaataatagccacctacattttcctcacaatcaggataaaatgttacatatacttgcgctccttttaatgttcttgctgttaccatatattttattttaattattgactggttataaagctggaattatgccgcttgctatcaatatacctcctttataaagttcaatcgtgcctggcacaaatcccatttttccaaaagcaatgttacggatataggctttgtattcatccgctttaaagttttgtccggtcagattattgaatatcatagagatagatatgttgtcgtcagaccaaagaatcattttttgaccttgccttatttcctcgatgcaactttcctttggaggatttctattcgatattaccttcatcatcttcattctttgggttgtacctacaaaaatctactatcaataaccgttcatccatgtatttggaagggtctgaggcaaggcgttgcttcagccaaaaatgttgtctgccgtatccataagcaaagaacttgtcaaaatccgtggtttcagacaattttgtaacaacagcttgaaaaccagctttgtctgttgcaaatacagcatggtttaccagttcaaccaataagttgggaatttgtgcgtcccatacgttaataagattttcaaatgtcacattcatagcgtctcaattagatattataaaaaacgatacaatcttccacttcggttgccttgccgaatagtgggtctttggtataataaggtggcataccgccttgcacgctgtctgcaatggggcataccagttcgatacaccgattacgcaataggttgtcaatcattttaatctctttgtctttcagtcctgtggcgtctccgttagccatgtaaggcaatgcccatgtgggtactctttcgatacttcgttccatatagcttttttttaagttaatactattattttctcaatgcctgacttgttttccctacgttacttttcagttccgcaggtcggcatatcagactttttaaggcatcccctgaatgaagccattgatggaataaggcaagcccggatatgaaaatcaaccatgcaatagtctattttcatcatacgagcaacgtgtggcttgctatttccgggcttcattctaatttcgccgcacgaaaagtgatgtgccggcttgcgagccaaaagagcaatatgcttctttatagtggtacaatgggaatcaatatgatataacagggaggattggttaaaaaaagagagtatgcgtaaatgtatctgttgaacataaaaaaacggccgaagccgtttttgaaaggagaaactgctgttaagcagctttcttggctttcttcttttttgaagcgacaggagctttttcttcttctttctccaccggctcatagaagtcggtgactgccatgatgatacggttatgtttgacaccttgctggtcagtccattcgtcgggtttgaaaaatcccttgactgtaatgtttttgcctttcttcaacaactcaaaagaagtgctgtcatttttacgccaggcttccacgtaaatgaaagatgacacatattcttctccgttttgctccttgcggcttactgccagtgggaagcgtgctacgcttgctgttgtaaactgacggatttctgcatccttaccaacgaaacctgttactgcgaatgaattttctactactttcttcataattctattttttagaagttaaacaattaatttttatgatgctatcggatattgcaggtatagggcggcaccaaggatagcacgcaaatacgctatatttttcacgcagtagaaaaatgtcggaagattttcgtgtatgtcattggtcagaacggagtgacccgtagatgcttcggcatcgctgcattatatctttgcatctgaaaaatattgtgacttcgccatcaaaaagagattgacgaagggagggcgaagaaaatagcagtaatagtcggaaaggaagctgaagtatgctaataaccgcacgtggctctatccatgaggtaaaggagcaaatcagaatggaaacttcattatgaaatgaaggaaccgtgaaaatcagcaatcacataggcattgttgatataaagtaatactcattgggatatagataacgtaaggctgactataaaaagtggagaaacgatattgccggcagtttcagtagcctatcggttggatagaagaaggaaaaagctgttaaacaaggaaaaagttatcagaaggttacttttcctgtcaaaaaagactttggctgtctttgggaaaaaggattgcggtgaaaccttttataacaggaatgtatgtaaacagatgatatataagaagaaaaacaaatggaataagttaaaaaaggtggattggaatacgctgtttctgcgtatctttgcaaatggaagcgtaacattataagaacgaactatgaccttccaaaagaaaaggcataacgtgcctataaagcgtatcaataacaaagaagatagagaatggaaaaactgattatatggattgtcctattggtgttcttttacctgatgaacaggataagcacatggaaaaagagagcggctacggcctttctggtggtggggcaacgtgcgacaacaaaggaggaacgcaaatgggggtatcgtaatgcgctgcgtgcaggggaacagaaagcggaaagattctatgtatattcagctttggaagatttcatggatgagaaaccgatgatgcctttcaagatgaaactttccaatggcaagaagattccggcaatattcattgactattacatacccaaaagggattggaattttatcactgaggaacaacggaagtttgtacaaatggtgtatgactttaaagacggacgtgtgtcttgcagccgtttatttaaagaagcattggcaaaactggatttgccggatagtgttactgttgtattcatgccatgcagcaatcaaagcaaataccttacccgattcagccggttgagcaatgctttgtcgtatgaagaaaagttgcatccgatgctgtacagtcttacttatctggaggctcgtgaaagcaaacacaacataaaagacagggataaggtaaatgcggattccaatgtcattatcaatgcagacatcgtaggcaagaaagtcgtgattatcgacgatgtgattacaacaggaagcagcatcaaggaacacgcagaggaacttggcaaatatggggtggaagttgtcgggattgtctgtttggctaaaaccgtgaaatatccggagaaagtggagatttggattgaatctcatttcaaataggaaaatgtaaaggagtacaggtttagtccggttcttgtagtatatatacaagatttcattaaacctgtttttctaaagctggagaatcttgctttccaaaaaaggaaatcttaaaagtaaaatgtgacaggtttagtttagtccttgtagtatatatacaagattcaattaaacctattattataaactcatccggctgattacttgattatgcactgagtggaaaatacagttggtgatttttcttttgggaggcaaaaaatatcaaatatagggagtgatttgaggttggaacttacttcttacgattttgtgttgattggctgaattttgaataattatgttactatcttgttaatctaataaatctattgttttgtatattattgtaattcagatatttatagtgctatttttatgatattcccatttatgacgagcaacatacaaggttagtgaaacggataatcccaactctttaccgatgattttcaggcaacggttgatattatgggctgcatagatatattgcttgcgttcatctatatcaccgaaaggtttgatgataggcaaaaggtaattggattgcgaagtatcgtacttatccacaatctcctgcatacacttctcccatttgatgaagagttgttgcccggtcttgcgtctgcgataggatagtaccccattctgcaaatccttttttcgtaggtatgccatatccacgaatgacatacctcgcgtatagaagctcataaggaacatatctctggcgaagtcaaaggacggattcatagagaagtccatctccttaattcgcttgatgactttcagaggtacggctcgcttgacggtcttatccactcccgtatagacgtgcttgaacgggaagcgttgtgaggtaagttccttctctacggcacgattatatactgctctgagattacgcatatagaatgatgaagagtttggactcactccgttattcttcaaatatgcttcgtatgccatcatcatatctgaatccatatcatccaacggcacatccttgtcctctcggaagcgtctgaaactgcatagggtcgcagcatatgtttccgatgtacggactttacccaatgctttcagattggcaataacgccctccataaatggaaagagaaaattttcggggttgtccgatgcaaattccgctatcacatcacctgcggtataatcacaaccgctatgctcaaaatcagcgatgaccttttggaaatgctttacatccatccggattttgtcgccaatctccgataggtggcgttttctgctctcgttgaacttgggtaacaccacctccgaagagtgactgttccactcatggccgtagagacggtagcccgtcttttgctgacgggctacacgattatggattacttgatagaaaattgagccttgtcctccatcaaccgttgatggtcggaacttaatctttactgttgccatatctcaatcagggttttgatttattttgtttaaccttactattatcctgcttgttcttaatggacttggctttgctctcctgttcccttgctgcctgctctttcaaacgtgcttgctcggcaagggcggcttgtttacgaacggcctcttcataggtttctacatcctcacgcatctgctcaattgcttcggcattgcggttgagttcaaagatgtcctccaatgtggctatctgctcagccgaagcatcacctttcatcttgatgtagcggtatttgagagaatcatcctcttcatccttgttccgctgcgactcaaagtaatatgcagacgctaagaatgcgatgaaaatcgtattgagtgtaatcacaaaccaatcaagtttggaattgaagttcagattgatgttatagtcattctctctatgaagtactttggactcctcaatcatcggtataagtgacgctgtcaactttttaaggttttcaaactcgttctgaatggctacaaaatcgggcttattcttacctgaaacaccctttacattatcattgacaacaccgaggttttcactcaaagtctttgtaagttcttgaatcttgcgttctgtgtacttacaattagcacctgtagcattctcaacaagagccttaatttcttgaactaatgcagtgttgtccacattaggaacagccgaattaccctcattcggttgaaacttttgcaattcaattactgcggtttcgattctctccaagcatccgtagatgccttccataaacgactcattgtcgttgtggttaaagtttttattactcatatcaatttgttttaagtgtgaaaaatttgtttgcttagaatcttattccttgattcttctttcgctccttcttcttttgtttctgccaagaaggtggttgctcttcctctggtggagcatctggaacatttagcaagcccaatccattgcactcaataaggctatcagtaacactataattttgctctgtttcttgccttgtcggttgctgtttaggttcaatctctgtctgcgttttcggcatatcccaacttaattgctcgttaagttttgaataactgaactgtctgctcacatcggaagccttgaaagtgtaaccgtctttggtgaaactcaacccctcattcttacccgttcttcggttaatcttaaaggtcatacctatgccttgcttttgcagttggttgcctaagtcccaccatgtccgactccgtttcaatgcagccttaacagcattatgaatctcatacttcacccgttcaggatcgtggagtttcttcacattggtcttgctcttatcctctgcgtatgtcaatccgtatttgtcttttagtttcttcgttgcaatctcatttcgcttaaaatcgttctgcgaagagattaccttaccatcatagtttatgcgattataaaccaaatgacaatgcggattatcggtgttatgatgccttaccaagatgaattgagtattcttaatacccatcaattccatatactccaatgcgattttggtcataaattcatccgttaatagtggtgcatcttctggtttaaagctgagtgcaatatgtcctaacggttgcttaattttcggatttaagagacattgacagttgaaactatcaatcatttctctgttgcttccgtgcaaaacgccgtcagatgcaatgatttcggcattgtcttttcccatcacatagcgaatgcatccaccaaaggattttcccttcttgattttgcctatcatctgcacctcctttcttcggctttgtagtcgcttaatacctccttcaacttggcaagcagttccatcactatattctttgcgcgatagaatcccatctgatgcgatagctttgttaactgattgagattatttgccatacccgtaaggttacggattacggctgcatcctcagccgaatgtttggcaactatgcgtgcttcaaaagcagcatctcgaatgtactcggcaagcgtgcgattggcgttcttgcttcggtggcgtaacttctcatagtctggcttcgagaacttcaccgttaccgattttgtgagtcgtttcagagtgcttacctgtggtctgcctctgggcttgggtttcgttattttcttattattcatcattgcgatttttacttggttattgatttttcaattcgttttttcacaatctgcgaccatcgggagcagattgcctccactcgggagtggagcgaggtttttcgggtgcaatggcgtccccgctgacatttttcggcatcccgaaagataacctcgctacaccccaagactgaggcttgctgcttcaaccttcatttccggttttcgatagttccgattgctttttctggtttagttaccgtaatgcagtccgtccgaactgccgttgggcggtaaggtaggcattgaggcattacattcctttccaatgctcgaaatcttctgaatatagttcaatgtgatggagaacgatgttctccaatagtcctgacatactcattctatcctcaccgattttgcaggcgaacttatcgagcatcttacgcaacttaccactgatgaataccggtttgcggtcttcaattttgtaaggtcgcataaaggtgttgcgatactcctccaatgagagcttgcgttgtttactgctcactcggcgttggatgggtggtgtcggtggctgttgctctactatattggttggcggaacttcatctgtcacctctgcaacggaaggcactgcttccgtttgggcttgctccgctactgatggcagaggaagtggcttgatgttttcaatagagaaatcctccaatgctgcatcaatactcttctttcgactctcttctatttgcgagttctgctcggagaaatccaaacctgtcatttcctgcaactctgttttacttaaagtctgttttttactcatttttttgaatgttttgaaagttaatactatggtctttgtgcacaattatgaccgattatctgctgcaaagaaaatgtgcatacaattctaccacaactaattaggtctatgtaggcaattatgaatagtattgctttttgggctgattcgtaggcagtgcagactgcataattcttcccaagttgaacgggttatgatggattggggcgaaacgcttaattgagagaattaaggtcttaaatctgatagcggatagacggactgccgaagtgtcgggagttggtctatccgctatactgttattatagaattagcgactatctgtttcggctgttcggagcagaagtttggcagacggataggcatcggtctgacaaacgacaatgctacggacaagatctgagatgggcagtcgcttgggatattcttatataatacagattacagtgttatgtatgcttagaaatatatcgttgtaaacatctaaaagtgccacaaactgtgccacatactgcaacagcctcaccgaatgattgaggtgtgataacttatctattacttcgcaccaacaaaacgaatttgcatataaggaaagagcctaattcaatggctaaatatagtgtctgtgatgaaacgatatgacaaggaatgacacctgttgttagtgctattgaagtatgaaaatctcttccttatttagcagtgcgaaacaagaaaacaagtgtaataaattaaaataaagcatatggatttaatcatttttgagagaaaggcatttgaggaatttgccacgaagattgagcagttcattctgcgagtatcaaactcacccgttgtcaagagcgggaagaaaaagacaaacaattggctcgaccatcaggatgtttgtcagcgattgaagattagcaagcgtacattgcagaccttgcgtgataatggtacgcttgcctataccaaaatcggcaatcgtacctactatctgcccgaagatgtggagagcattgtaacgaaggtggaggacagacgaaaagaagccagatggcgaggacgagaaatctaatcaatgtataacaaaaaaaacatttgaactatgtatcaagaaatgcgaacaaaagacgatgcgtggatgcagtccattcacgagagtatcgaccaactatcggaaatactcgatagtatgcccaaagacagtgcagccttacaaaacgatgatgagtatctatgcgacaaagaagttgcgtatatgcttaaagtgagccgaagaacattgagcgagtaccgaagcaatggcacattgccttactatgttctcggtgggaaagttctgtacaagcgaagtgagattgagcaggcattgaaacgggagtacaacggcaagcacctacttaatagtagtggataaatcccttctatatttttggagggagtgaaatttaccgcttgccctatattcatctattgcaaaataatagtgcccctatggatagaagcaataacagcatacaaatgggttatcaatgtaagaacccgtttgtatgctgtctgtttatcttcttctacattttcgtcagtcgttcatttccgttgccgtctgcatttctgagtacagacattgaaaggggaaaggttttcgggctgaatactctccgtaggaggaagattcagtccgaaacggcttgccgcctgacctttcaactttcaagggctgatgtactaccttcgcagacgagcaaaggaaatgggcgaatgacggaatcgggaaactcataatatcgcagattgatgattgaccaaattcaaatattaccctgaacaatgaaaaatgcaccgtccttttgctcgtttataaaaaagttgtacctttgttccaagatgagttgtacatcaatgcaaatcacgcaagtatgtagaaatcagaacagttgccaactcattacctcgttcttgaactttccgcataaactttttattcttagcggattatgagattattccaaaaataaacattattttgtataaaacaaccctctataataggaatttctgacaaaaaagaaacgaactattattacaatataaacaaaaagagcgactattcagccgcccctttcgcattaacgagatagacataaaagcatctcgaatcatctctgtagatgaatccgaaccactacagagtttccattcattctacagtttctcctttttcattcagaagtaccgttacttcttcagtggattgattttccttggtgatggtcaacacaaccttataaatcttaccggtttctttctcggaaatgaaagcctcctttattacagccccctcatagtccttagccaagacattcataactgcctgaggcaagtcttttacttccacttttgtgaactcatcctgaggattttgctgagtttgctctacagactgtgttccagaaaccacgtaagcaaatgctactgaactgcctaatcccataaccattgctaatgctaccaatacttttttcataatcgtaagttttaagtaaataaatatagtttttgtattaactataggacaaacgatatgccatgatatacatcagtacataatacattatacatcagcatattataaaaacaagaaggaataattatgtgtggaaatatgtggaactgagtaccacacatggggaataattacacaatatggattacttaattcctgggaaatggaacaaggcagctgaataagctgccccttctataaaacagtcaacaaacagacattcactaatcaaatgacataaacataagcataaataacccggctaaagccatagcaaatgcaattaccatataaattacttttttcataactaataatttggttaaacacatatttccatcgcacgttcaacaacgtactcttatctccgacaaaacctcagccgcataaaagctgaggtccagcatgttcctttcaatatctacaatcaattagagcacacaatgttggaacattctgtaaatccagtataaagaaactgcaatggctgaaagaaggactatactaacactatacaccggattctactataaagacaaatgtgtttctgaaattccctacgtgatttgagggaatttttataaaagaaaaggcacgcaaacgaaaaagccccgacatgtcatatacaaggtatgaattgttactgaaatatgaacaaaggaaaaggcaacttattgggctacctttccttttatataatctattccctcattccccataccttttttccagatattatatgtaatatatgataaataatcacagttttcatttataatatttttatcaatactgaactcattacatcttaaagcctcactggatttgcaatgcctttcaataccttttttcttatacaaacaacatatcctctcgctcgtataataattcgttttataatatttacataagaaacaatttctcacattttcataatttttataggcaattacccaaccaaaagtcaaaggatctatagtacgattagtataataatcgaatgtaatctcaaatatagcagatgaatatcgatgggtatattcattacaactaatacgcttatataaacctttcattgattctaataatacgaatttattgagttgcatcccacatgttctagtaatcccatctttacgcctaaaattataaaacattgttgtttcatcttctgaaattattccatttcttataatatcgtctaattcatattcggagcttagagcaacttcaataatacgcatcccagattctatcttctccttctcacattgatgtgaaactaaaatctcaataaaaataggctcatgtctattttcagaatcagaaagaagtaaatcagcccggaaacctttatatgttttttctcgagtgattacattgtaataattctttaagttaaaagatcggctcgattttttctcacaataagaagtatagtcatcatgattccatagacaatgttcaaaattagagcatctatcttttgttctaaaagagatatttaatgcactatctgaattaaaccactcttcaattcttttcttggcaagagcatgaagataagtttcgtagctacagttttgcggtcttatcttatgagcataatgctttactttaatagaaccttcttttacaaccatttctcctttgcaatgaggacatcgatattctattcctttctgagcatttccaataccaatgcaattttcattcttatcaagagcatacgtatatttgagttctgccatattaaagaatcatgctttattcaacaaaagtcatattcatttttatctttgaaaaatggaattatcagtcgtctgcacgttggctaataagaattcttctaaagcggcacattcaaaagccgaatcaaatggaaccgcaatagctgcaatatatttaggtgacgtgctccaataagggcttctaacccggcatttcccttcaccatcataacaaaaataacttccaagccttctgccaatggcaacggatgatttacctatatatagcacattgtccttatcgtccataatcaaatagactccaggcctatcggcatatgggtagcattggggccagcagttttccatattctctttcccaggaaacaaatcatacttgttactaactgaaaaacgtgtaagacttgggtgacgatacttctcttcgtataatctcactaattttaaaacctcatctaattttgccattcttggttactctgttttttaaatcatcgaatcccttttgccaaaaacacatatctacaactttcattgatggatagtggtagtgaagtttttcagaaatatatctttggcattgctgtattgtatctttattgctctgagaacaatcaattatccgctttaataattcttcgtcaaactgcttgccttgacaatgaaatgcccgcttaaacaagtcatccaatgcaggaacacagccaatggttcccaacatgattttagtaatcagagtatctgtcgcagcaaggtttaaggatgaagtcttattttccggtttataatatgtgattttactgtagtaatctttgagcgcattgtacaacttcattatttgagaaacatcatccattgtaaaccattcttttcgtagggaatgaaatttccttattatgtttacggcatccatatgaatcgtataatctttccaaagtattccacaactacctctatacattccccaactcgctaaataaaaagcaaggtgaagagataaatagtctactgaatctaaattaccgaatgccgtatagcaatattcccatgatttaaagcgatgatttgagtcttgaaccatattactcaaatatttttcaacgctacttttttctatgtctaaaataggaaatgtcatttctatatagttaattgtttgactcaataaattccttcaaccgatacaatctatcaatggccggattgtagaaagcatccggatagtgctgcttaatatcgcagatattcgcattaacatacatagaggtgtcaaaaatatgttctgcctcacttagcatcacctccttgggtaactgggttgtttgtgcccattcgattattgccttgacggattcctcgtcataggaatatttactttcttctgccataattgctatttatgtttttatgaattagcctgcacaaatatagataattgaagccaattacaaatgatatagaagccgaagttataggaaatattgaggctttgcattaattttgtcactacttataattttttacaccatatgagcccaaagaatgtatatgaattaatccaggaaagactggaagtgatttttaaagagttcgacaatatatacatttccttttcaggtggaaaggatagcggagtgttgctgaacctatgtctggactatatgcgtaggaaccggctgaagcgcaggattggagtgttccacatggactatgagatacagtacagtatgaccattgactatgtggaccgggtattggaggcaaacaaggacatgctggacgtgtaccgtgtctgcgtgcctttccgtgtaacgacctgtacctccatgtaccagaactactggcgtccctgggacgaagcaaaaaaggaagcatgggtcagagaaatgccggagggcgcaatgactgtagacgatttccctttctataaccgcaggatgtgggactatgaatttcagacagagttttcccgttggctccatcaacggaaagctgcacggcgtacctgctgtctggtgggcatacgtacccaagaaagctacaaccgttggcgcacaatctatcgaggtgtgaaagagcaatataaggattaccaatggagcacgaaaatcggtgagggtgtgtataacctatacccactgttcgactggaaaacggaggatatatggattgccaacggcaaattccgatgggattacaataaactatacgacctctactaccaagccggggtaagccttgaccggcaacgggtggcaagtccattcatcagtgaggccattgagagccttgccttgtataaagtcattgaccccaatacttggggacggatgataggacgtgtaaacggagtcggctttgccggactttacggcaatacccgtgcggcaggaaggagagcgatacgtctgccggatggatatacctggaagtcattcatggaattcctgctttcgaccctgccggaacataccaggagaagataccaggccaagctggaaaccagtatcaaattttggaaggaaaagggtggagttctcagtgatgaagtcatacagaagctgaaagaccgcaatatccccatccaggtaggtgacagcaccaactataggacagacaagaaaccagtacgaatggactacctggatgacattgacatagaagagttccgagaaattcccacctataagcgtatgtgtatatgtatcctgcgtaacgaccatacctgcaagtatatggggttcgccctaaccaaggaggagaatgaaatgaagagcaatgccttgaaaaaatacaaggatattttataaatactgcattgtacagtaaacatataaaactgccccgactttcgcaagccagagcagtccaatttataaatttaaagtcttatgatgaagattgtctgttgcgccaatgttttactatcagcataacgacaatcaaaacggttacacaaacacaagcaaaaccaatttgtttaagcaaggtggattcttttttttcttttatagtttctgaccgtttttcctcacgggtattggaaatggttcttttatcagccttgacactcgtagtatcggctactaccgtctgtctatcctccttcttattgaaatcaccttctacatgaccgtcagccaataacggagatttcccggtcaggctgtcgggcggttttcttgtatcatagatacggaaatcaatcacatagttaccattagcggtaatgagttcgctcaaagaggtacttgccccatgtacgatatcgaccgattcactcgtgctgtcctttctgattacttctgcatcggacttgacagttttatgagagctgccacatgataacaataggaacagacacatgaaaggagccagcaatatatgccggcttacccagttcataaccttagccaacataggcaatgtcatttatacggttcatccagcctctcttgaatttattgttagccggacgtttcctgcatatatcctcaatgaagtcgaaccgtgcaatcttaatcatgtcgaacaactcacgcgggttcctggcattcaccgcagcaagtgtcttaggtccaacaatgccatctacagaaacaccaagcaagcgttgaggtatctttattccgtgtgcaccggatgcccacacccaatcgacaaggatattagcaactgattgcgatttaatatcgtcagctttccatctgtcccaataatgcggcttgagcacccggttaacgacatcctcacgggtaagcagacgcaggtcatccacgtctatatcaccgtcgccgtccttgtcatagccgcatgacttccacgtaccgatagtcacacccatattcgtagcacctccaaggtctgccgggtcattcacgaaaccgccttcccattttaggataaacggtgcaagttgattcacattcgccatttcaattttcctccttattcaattaatacccattttgcggttctctatcaccgcacttctttctctcacaccgtttcagtgccagttccagtttcaggtcagaattagtctccttcagtgtaaacagctcatcctgtgccttacggagccggtctgtctgctccacaaatcgctgttccttctccgaaagctgcttctgcaggaactcgttgtactcccgtaatgccttgaactcctcgacatcagcatgcgcgtcctcaatacgcgcgttggtcttacgcgacatccaccacttaataagctgcttgatgccctcaatgccaccgagtgcggtcaccaacataacccaatcattcatacccattttattactttatttataaccatcaaattgtcagacaaccacaaaagtaagtaagcctatgtcaaacatactgccaattcgggattttccactgacacagaatgtcaatgcaaagatagatatggatgtagccttcaaaaaggacattatttttttgacattctccgcaaatggtcatccaatgttttagggttacatttaagcttacgacatatggctgcctttgaataaccatattcgagcatagttctaatgagaggttcctttcctgtaagcttgtaatgcgtgtttttatccccctttttccgaccaagtcgtattcctgcagcttttctgtaagcaagggcctccttggttcgctgactgatcaaatcacgttcaatctcagcggataaaccgaaagcgaatgccaataccttactgttgatgttattacctaattcgtaacgttccttgacagtaagaacgcaagtctccttaatcatacagaggtgaagcattgacataatacccatcaggtttcttcctaatcggctgatttctgttatgattagagtgtcgcctttcttcatcctcttgagaagtggacctaatttcctatcattagcaattttggtaccggaaaccttctcggacacccatttatctattacaagtcctttttccgttgcaaatttctggacttcgaacctttggttctcgacagtctgtttgtctgtcgacacacgaatatatgcgtaaaccatttttgcggtgaaggtagtcttattcaacagcctaaccaaaaagggtattctaatgaccctcaaaaatacaaaggtatgatggagaagattgatattacagccacgggagtagttgatagtattcgtaataagatggcagtggctacagtttccaataaaggattaatgccatcaggtgtgttatcggagttccaaggcgcgtatagtgtacttctgtttgagactacaagcactccagttacaggctcaattcttttgtctatatctgcaacatcaagcggaatgcctagcctatattacatctccatatcacgagctggtgatgtaacaggcaatcctaatctaaaagtcaaagtcctctcaggtagctataatattaagattaaagctaagactgaagctgatgggaagtgcaggatttatgctgaacggctgcaatatacacctattttggatgcgcttcttatgagttcttttggcatatcaatgaagatggaagcagcggataacagtgcattcgaaggaggatttgaagctacattggaatagtataggggcaagtgcccctatactattccaactgtttcatttataagatttgtatctgttaaagagttatattctaaagaaccatcaacggatacagcgtttatcttattgtataggcagaaagcagcaacagaactccatggtataatccctttttacctacaacagacatctgctttctaacctcttctgcaatgcttgcatctttaatatcaatcttctcaatcatatccttaatttcatagtaagtctgtccagtccgtaacattctcttcaagaacgttacggaatacacaatctgtcgtgtagaatccttgaaaacaagttattatagaataattcgtattgaatttaaccgcaagatataactgcccttcataagtacaatgtcccaatttaaagtttacaggaccattggcacttactcccattacattcatatcattaacaaggaatgaagaggaacggaacagcattatatcggcttttaccatcataggcatgtagtccattccagctcttaacacatataggctacccaagactccggctgcatccattttaccagtcagtccgggaatggggacaatcaaaagaatcctgcctcctgcccctgaaatagtactataccttaattgtgtatatcgtaatttgtccgttcccgatgccatagcgatatactcagtctttggcaaacggtctataggcatttgcgccaagctttgaccggatgttaacccaataagtgatgccggattgccggttgccacttctgataactttactttctctatcatccttgtacttttgagggtcgtcattttcggataaaaacgacaaccggtttaacattttgtttttattctcgttttgtttaatattttgctaattaattgggtcttcgtaagtacgttcttccaattccgcataagaataggctacgtccgttcctttagttagaatccatattgcacctaatgacatgaactcatatactccgctttttgatatagcgatcttattgcaataatgatattcattattttcaaatgtaagttcattaaatccatctgttgttacaactgaagtataaccataagtgcttcccattgctgcattatatattgtcaacgagattttcatcccattatattggacagcctctggaagcatatacatactctgggaaattcggtttggacggccattccgaaattcagagccaaaagccggattcaaaaagaaatacccctcgtttgcacggaaatcatgcatccgaacaaatgatgcattggcaataattgtcccctcaacttcaacattacgtcccttgaagctcccagtcagaaaatcaaggagtaagtttggtcgaaacttgtttgccggattcatcgggtcattgtaattaaaatctttatatccgcctaccgtttctacagcagagccatcggcttttattccgtattgcgaaaacatatactgcccatagaacaccgcacttgccagcttggcgaaattcgccatcagtacctcgataaaggcatactgtatcttgtccatcactacccatgtcgccttactgccgtttgccgcatagtctgtcttggggttgacacccttaaatgtgccctccttagccaacacgtagtattgaccttcacacagtaccatcggtgtcgatagagccgtacgggtgtagcctgtggatgcggaatattctccagccggatagaccagcggaccgatcggtccctgctggagatacttcacttctcccgtcttgcttgccaacgctttctttgccatatcatgctgccgttgagattgtccatgaaacattgccgcctgcctgctggcacatagcttcagtgcaggtaccgcttgccgcagccacattcgccgtagccggattgagaatgacccctgccgaatccataaagacaaaatagaacagcatattctttgccttcgtggtctgtccccgcttgacaaggataggcgtataagtcaccgaacctccggaaccggaaacaatcgtctcatcctcgggattgggattagttatgatgtcgtaggggtctgacaagtccatcaccgtctgcgtgtcaaggcctatcagattgccgccctgcgacacctccaccttaaagatgcccgtagtgtcaaccaggctgtccgtaacggtcagactcttgccggtctggtcgacgagtgtctgccaggcaccgttaaccatcctggaccacttgtaggttagtccggaggtgatctctgacgctccacgtctcgccattgccgtgagaacgacactgcctcccttctcacggatggcaaagtatttgtcatctccggaaacgatggtcaccacgttctggttgcccacacccttggtgatagggatgctgtaaacgaactgcacctcatccgacacgttgcccacggtcaccgtagccaccgccttgacgctgcagctcgcaccggacgacgccttcaccaggttcttcacgatctgaagcccgtaatagttcgtagtgcccgccttgtaggggatgtacttgaaatgccccgtctcgccgccgaacgtgttcgtggaaacgttggatgtgaagcttatcaacacgtcattgaaataccacctgatggaagagggcaccacaaccccctctgccacccgtgaggaggtgagaaggaaggagagcgtcggcttcatcgtggtgaagtcgggggctatgtttgtcggagcacccgattcaccatcatactcttgatagaggtcgcctttgtcgcacataatcgctggcatgtaaacgccagacttttgcgaaaagattacctgcccgaccttactcgctacgctcatcggtcacctcctccccgtctttatccatgaaaccctccggagtggcgacctccaccggatcttccacgccgtctatctcacccttggcctgctgcggggaaaggcacacgcccccgactactgccgcccggtcgaataccgtatcgccgggaaagcctgccacatcggcctgccataacagcacattgccgtcggcagtgctgttgcggattcctgccactcccagcttgtccgcaacctctctcgtcactttgatataaaatgccatactgctatcgattaatggttaaacatcccttttccttgccactataaacttaccgctgtcatccgtcacgtacttgccgtcagatgtcaccaccgccgcatacgggcccttgtcaatcaccttcagctgtagcatcatgccgtcggtgcatgggatggagggcgagtacccggcagcggccagcacgtatgaggaggcgccggccgccttcgtgtaccattcgcactcaaggatggcctggggattggggacaatccctgccgtatcacggatgaccggtttcgggtatatcatcttggttccgtctgccacctgctgcggaaatccctcccagtcaatctcgatgctgggaatacgcctgcggatggtggtggagacatagtctatgtcactgtccggcttggatgaaggagcaccgtccttcgagtacgatgctttcacgacgtaggtctgttcgtggccgatatagtcccggtctatggtaagcacgttctttgtcagtgatacgaactcccagtcattgtcgccgttaccgtcggtaatctgctccagtgcgcccgtattcagcttccgatagaagaagaacttgcacttgttggttgctgtgacatctacatcaccgacaagcagtctggcggtgatggcctgcctggcaatgtcccgacacgggttccaatcaagtgccgacggagagtcgaccatcagcttaggctgcgcctcgctgccgtcaacggcgcggacaagacggctgaaacggtagacatgcgtctgtccggtacgcttcgcatcgacatactcggcgtagaactccagtgttaccggactgccgggaacggcgttctttttcacttgtatcttacccttctcggctccggtctcggtaatgacatagctcttgttggcagatgtaatcaatgtccgtacaccgttcaagcgctcgtaccacttcatgttgaccaatgacgcgttgaccgcacccaccttgaccaccgcatccgggtcggtggcattgcaccgggggaacagcgtcaggggggtaagcgtgtagtccggagtgtactcggccttgtcagcctggtacacctgcacgtccggcacgctgccgacaacctctatcccgccgctggtctggagagggcggtagttgacctctatcttcttctgtatagtctgcataattagaaagttatataattcattgtctcataattgttctgcccgtcacgcagcaatacccgtgcgatgaacttgcacccggtcatgttcatatagtcggggccgaggtcgttgaccgtcagcggcagtgacttgccggtttccgcgtgtgcgaccgcccaggcgttgtcctcggtgacgttgcccgtatcgcgcgtccactccacatcactgtcaaggatatgcgccgtaacgtcacggttgtacagctcaccggtaatggtgagggtggtcgcaaaacgctccgcatcgaagtaccagccattggagctttctatatcgatgctgaaatccggattgccctcgaccattgcccagcccgctgctccgtacttcggttcgtcggtagtgccggaaacaagacacatccacttgcatccgtagtgccacacggtatcgtacatcatcacacgtacggtctcggtctgtgcctcgcggtcggcttggtagggttctgctccggtggcggtctccatgttccactctccgcggtcgttggcgatgcggggcaatacgccttggaagtcgatgcggtggatgtcctgcgctaccaatccccggacgtagatataagagtgcaggtagttgatgggcaggttgtcgaacagagacagatgcttcagcctgccgacgatcaccgaatagttgctttcctcaaggacgggttttgtgaccccgttaagcatgcagatacaatgctcacgggatgacagataccaataaccctgccgttcagtatcaaccgggttgccacggtgtgataatatcatcaacggctcaggaggataattcttgccacccggcacctcgctatcagggtacatcacagcgttgatcgtattggctgagatgtcaacatgcaagacacgtagccaggaggtataatacttgccgccacctgatgcaaggtcattgacaacaccatatacaacatcgttttctgccagtgcagtaaagtcgttatcccaccgtttcttcatcttcaggctgtatgtgccgtcttcaagctgcgatacactttcgatggtaccggactcggagaaggaatagtcgctctccatggcggagagacggttgaagataagctcaaggacggtaaggctgtcgcggacctcgaggcaggacagctgcatacggccgtcagggaatattccggcacccttgcccgcgaccatagagtcgataaactcgccgaacttcaacagaaaatttgtgccgtcagcctggtcttttcgaaggaacacctttgataattcttcgatgctcattccttgttgaatgagttcaagaatgccaataaatgtccgtccaaccctctctgcggtattctctccctcagaagaggcgttccttatctgtagagcaagtttccttaatatgtcaagtgtatcaggcattattcaccaagtactctaaaagttacacgattagcattaatccctccacttcccctatacagcggaaagtcttttttattatcattcaaataccgaacacattctttcatatacctatcagcaacagagaaagcatcattataagccataagtttctccttaaaatcagaacgcgatgaatattcgttatctttattgacaaatccaaaacgggtgacatttccatctccatttttcacgatacgagcataggtataatatgccaatgtcgttttcagccctacaaaggaacgtttgcctccacattctatggtataagaactaccattaagcaactcactataattttccggatgttctttcacatctaagaataaagcatcacccaaagctgacttcaaatcaatgttctccgactcccgaatatatgcctctatcttttccgtatcgatgtgtattgacatcgtacgagccaacttatagacctcatctgttgttattagacatcgcagcatttcttatatatttaagaggttgtacactaaagtcattggaaggattgagaggttcataccaatgcgcaaaaattttctgaaaagcccgttcaatcatgcgttgttgctttgacacaatagagttatagtattcaaaagcatcttccaatatatccccagaaaaaccaaccttaccaatccggatacaataccaaggctcctgcccgaaagccgaataaatacgttcaaccacactggcatcagtaacggtaaactccttatcataatttttaggactaatatccacaaactccggtttttcttcatcagattccaaggttacctctaagacctttgtcgcattggtgtctccttgtaattgcacgatagtatcagaaaaaccagtatcttcattagtcctatcctcttttataggatttccgttttcatcaaaacgtaccgaagaagcacctttctttgtaattatcatcccggaaggcatgaagttacaacgcacattacgatacttcacattggctaatccctcatccgtactcatttccgtaatcacacggtcagctcttccgataggatacacgaatttccctgtgttgctaatccatagtatctgccccttatagttttcaatccctccggcagcccgaatttgcgcatagaccacctctttacgtggattaaatacatctataaactctacattttctggtattacctttatggcttttccctgacgggttttctttcctgtccaatccggatgaactgcgatttttgcgatatatccggattcatcctcctccaacaaacggcaattttcaaaggggatgtgctgtacttccactatatctgcgaacatattataattaacatgtatcgccatcccatcgtaatcagcaacatccttgcagacgaaagcatggatgtcatctgccgtatctccacggcggttaaccacatattcagaaaaagcaacctcacgaaacccatttccctctatgaaattggcataacgttctgcacattcactacccgttgaactcgcagcgatgatatttcttagatgttggggatataaattatcatcaccgtagctttggatgccaagattacgtaaatagcccgtgtcaacacgcctattactcttcttctttaattcatttacattcatcgttccgtgaggttgttctttatttcaccgtttctacggcttctatagtctgcttagagtcaactacagattgagcctctttaatatgagcatccaatactttagctgtaactttcttcccgttcagtttataagtcttgaacgcatctctcacaaactcagaagtagcaccttccacttcaaaggctttcaccaattctgaaaccaaagtttcatccaatggtaaagcaggactcatccgtctttcaacccttttctcccaatcggaaggcgttgaagcaaaaaagactatccctttaggattttccgcaagatacctttctgccgcttcgtcagtaagattgttgttggtgtacatttcactacttccaaagcctacttggagcaatacaccatttttcaatgcataacttgatttttctttcatttttccatatctttttaagtacgaatacatttcaatcacagcgtcacgatagcaatcaccacatgaggtcttggtaaatgtcctaccaagaacttcatgaaacatcagttcaatgtctgatttatcagaagaagaaagggagaccttatcccccaatctcttcaacttatcaaccatctccaagacaagcatattccctcctatgctgccggttcagccgtcaaagtgttgacagcagtcttagttgcttcataactcgtcttgaacaagaataatgcagatttaggcgttttctgctcttccaaggtaacagcccatccaccttcagtatcctcgctatacttatcgttgtcgatagctgtagctgtaagcccttggtagtaaccatacacctgaaaagcggcatcaccagggtttccttctttctgtaaacccttatatttattctccaacaccacaacataggtaccgttagccaatccgtcaataacatcagcgcatacatccgggtcgtttgccaatatcacaatcgcgacagtattggtaaacgaactacgatatgtgccagccactaatgaggtctttgtacccgtaaatggatttttaccaggaacaacaaccttataagccttcttcccggttttcatagccagcgtttcaatcacattcttttttgtagaattgaatactgtggctgcaaagtccacatccgcacgattcattattaccccttcctgctccaatccttgtactactggatcatcacacgacggaacaatatctttctttaaaatatcatcacatactcccatagaatacctccttttgtcaatatgctacttgcaccaagttgtcctcgccaatcatagaaccgagtttaccagtagaatagatataattcttacggggttttctttcaaaccagatatcaaggtcagatatcgggttatcgccttcacaaccgtacattaaattgtccggagaacatagaaccgcacggtgaggaaggttcagtttcgttttatcgttctgatacgcttgaataaatctatcccaaatagaacattttacgaccgtaacgccgtcatactctcctacttcaaggccgtcaaaaatgaccgtccaaggcataataaccttatatttctccctcacatcacgtgacaaagaatcacataatgattttgtagcaaaaattgcatgtccggacttctggaaaatacggctatccgcatcttcaagcatcgtgtcaaacacagatgtagcagcccccaattctttcatcttggacttctgcaaagcataagatgcttcagagttggctgatataacggtatgctgaccggaattctctgcacatatggcaaacaggcgtttaaagaaaccgtcacatgtcttgaacaattctacattcaatccatccgtaatttgaccggaaccgtcaatattagcggcatccttgtctccaaaccaagtgaagcgccataacattttcatcattgcttccgtcagttttggaaggacaatcccatccatatattcagtagaagtaaggtccgcaatattggtaccggtcttcaagcagtactttgcaatagtattctccaaatcctcatagcacatttccaacggaacttgccagtcgccaatttcccatactttctgggcggcagcgatagccactttttgatattcagggtcacatccggcacctgcgatacctacatcctccatctcaccgatgaagccaactttcttgccattggtcactttaggcatgaacgtcataaaacgctccatatcctcattttgaaagactgtcagttcaatcaagtctttcaaatccttcaccgcctgattgtctggcgtcaattttgaaaaatctaaaataggcatactcaattctcctttctttactttttagttctcttctccctttcctctctcaactttctttgaataggtgtctcctctgcacttgcttgtgtctcaacagtattcttgaaggattgggtacgcaaagagactctataggttgaacaatgttttgctagccaattctcacctcctgccatctttacagcattcagtatcttattgtcctcaactgtacgggcattggttttcaatgccgcattttcctcttcaagttcttcaatgcgcgcctttaaagcttcaatctcctcgtcaccgtttgcttcttccgggtctttgatttctgtaatcactccgtctgttacaatgatagtcttaccatcgggcataacatgctcgccatcgggggatgccgcatctcccacctgcggttctccttcttcacgttccaccgtcagtgtattaccttcggcatctgtcagttccatagatactaccggaatgtcttctatcttctggtagccacatttcgcaagcagtctgtcaatgatagattgctttaccgttacttgtttctctttgttcattttctcactattaagtttataatcagttccttttgctgtagtcggtataagaacatcagatataaatccaagttgttttgcaacctcaccgccaaaccatgcctccttgttcatctggacctccaaaatggtcgattcaactcctgtccgttcaacatatacagccatcatcttatccttttccgcttccagacttgacttgatggattctatagtttcaaggtccaataaatcatcatatcttgccaaatatggtttgtggatgagaaactttgcatgaggataagcttttctgcgttcaagtggagcagaaagcaaaatgatggtagccatagaagcacatcgtccaacaacggtacaagatatttccttgcccgacgcacgtaatgcatcataaatagcatacccctcaaccgtatcaccgccgcacgaatggatttcaatgtcaattttagggtcagccgggtcaagccatgaaaggaagtattggatatccggaaacgaaagcccctcgtcaccggtcaaataccaattttccattttatccttatcagctacaatgtccttgttaatgtataatttagccatatcacataattgtttgtaacaaaggtagaaaacatgatacggcttgaagaaaataagaagtctattccactgacacgctttgtcagcaactttttcaaaacaaaaaaagagcggaataattccgccccccctaaacatccaccttacttgagaacttatctattatccgataaattgtcctttccgcaatattatactcatcggataaatattgcatgatataagtctttttatgtccctcctttgacagacggacatattcttgatacacgggaatatatttcacatccccgacatcaagcgaagcatcccccatcatttgaagaagactcttattcaatatcaatagttcatatgctttcatatactaccaagattttcaacgtacttaaccctattagcaacagaggtaaactcttccacagaaaccaccggagcaggcgccatcatcataccttttgcaacagctttggccagcatgtcctctcctaacgcctgattggaagaagctgttacattaatgggaatacctcctcctatctgattgaaagccgacaataacggagcaaacatcgaggttgcagcagccgtcattacactttcaccgttggacaacatagcaggtatggaatcgcttgtaccggaacctggcccttcaactttacctccttgtgcaaatttagcacttttcaccgatttcatagcctttcccataacagtagttacagatgccactacagtacctatcgcagcaagcatgtcaatccatgttgcagatgagcgggtagctgtttctacggctttggcaatggctaccccttgcgcaatagaaacctccgcaatagccagtattttcgccaactgagccatattctcgttatctcctgccgcttgttccaacaaatcagaaagattccctgccaagacagaaagggattcacctttattttgctgcatctccacttccttgtcaatgaccgcctgctttgcattcaagtattcttggtctgcagcaagctgcctggcccggaattcggcatcactctcctctcccatccgtctcaagctgtctttcagttcaagcttctgctgttcctgcatacgaagaagctcaagttcactatctccattcaatttagcttctgccaattcattatccaatcgaagtttgagtgcatcagcttgtttctttgctgtatcattctcatgttgaacggacaaatcataaatctctttattgtacttctccgtaatagcaagcttcatctgttcagtaagctctttctgacggagttctacgtcacgttgggcaacaagttgctgcatctttagttggtactcctgctcacctccagcttttacggattcaagttgcagagagattagtttctgccggttctccacctccttcatcagttgttcttccgataattgctgtaatgcatcatttttttgctgttcaagtgcaataatctgattatttatagctccacgtgctttcgttgtaaggtcttgttcctcaatcaagcgaacacgcaaatcttctatttgacgagaaaactgacgttctatctcaatggattgtttctctctactgtccttaaccagcttaagcatttcatcctcagccttacgaatttctgaaagttctttttcttttacaactttagccttatctactgattctttccgcatcgcatttattttattctgggtttccttattacgggtatagctctccatttccttttgagctacgtccgaaaaaacttgagagaattcctttaaatctttcactgtactttctgatatacccaatcggctaataacctcatcagccgttactgccccttgtgccatatcatcaagcaatttattagcttcaccagtaagttctatttgcccaagaagatttgccaatttctttcggccaatatcaatgctttcctgctgaagtttattttccatatcgtatgcttttgtagccgcatcagtacgctctttcaggctttttgtagtatcatctgcaatgagcttcaatctttcaatctcagagcgacttgccgcacgcttcatattaagcattgtttccgatttctctaactgttgcaatgcatcattcagtgcccacgcttgtttcgcatcatttgaaatttcttttccaataccggaaaaactatccttcatatcctttgctgcaccagaaaaatcaccagagaagaatttagcaatagctccaccaaactttgcaatccggtctataatcacatcaataattgccccaaaagaggacattacattagaaagaaattcagtacctttttgcgttttagccaaccatgcgaccaatgagcccaacaaaacaacaatagccccaataccagtggaaattagtgcaagtttcaacacttttaaagctgcagataacaaattacttgttatagccgctgttttttgagcaccagagaacatattcgcagtgaccgttcctgctttgtactggactgttattttaaccaattcatccttcaaaccaccaacaaattcctttgtacctcgcaagacgctaacgccactgcgcaatatggaaacaaaaggtacttgggcttctgtagcctgaagtatcgcatctttataattacccacattccgataaaagcgctgcgtttcttcttccgcacctttcagttcatcggtaatggcatttatcttatcttgcagctctttgccttcgcccccctcacgctctacacgacttaatctgtcataagcagcggtaagattggaaagctcagcccacaacctaacaaggcttccttccatctctgtctgctctttacgttcattttgaatttgtttattcagtacacggatggattcggtgtattctttggcggctatctttgtttctgccatcattaagttgtatttttccctctctatccgccctttactcacatcctccttcaactgcttttcccttgcttttaatttatcaagttcagtactgtattcagctatcttagtaatggctttatcatacctcactttaatctctaatattttctcttccgcatttcccataactacacctccaattgtaacaatttacattcacatattcccgtatcttctgccttaatggaaataatggcataatatctaccatattgggccaaataaattggaacagtcatatctaagtctctcaactcaatatcatttatttctatcttttctgtaataacaataggccttcgtatgatagattggtatgtttggtaatacatagaaaggagtgtattccaatcaagaccagtaaatacccctttcacaccattataagccaataatcttggctcaactgaattgtattccaaattaccttcctcatcatatgaatatattggtatcttggctacatccgagaattggtcactagcagcaaacggcaattcaacaacatctctttcactttctatcgtttcgttttctacaaacaaatacccatcatatttccccactaccgtatcatcctccttccatctataaaaattcttttgagaaaaatcatcaagagaataggcaatcgcattaggtttattatctttatatgtagcaaccagcctacgggtccaatccaacgctttcgccttattagacataattgtatcaaatgatacaaacacaaggccgttactttctgtgaacaaagggaaagtacctatgattgccgatatagctttaataaaatcagactgctttatatctggcagattaggtattatccaatatctaccacccaataatatttcttgctctatattcgttatcttcaacgtgccgctaatagaaacgacatcagatggcttgcctatattctgcaaagcaaatttcagatgaggaatagaagaatgtagagtagaaagcatctctgtttgcctattctcaaattgaaacaagacctcatatacaccgtcacttataaaatttacattcagtaatggaattgtaagtacagtacttgtatccagttcgctaccgacttcattgaagttgtaattataaacttccaatgtagcagataatggagccacatttgtatttactttaactttaaaattacccgatatcttaggtacagcatttatgactttagacctatagccattgtaatatcctccactcactccgtttcctattactgcaaggtttccataaaacgaaccaacatttcccatatcgttgaagtatatgtttgtcttgccagccctatcctctgcaacgccctttaaatcaatggttatagcttcgatttctgcatactcttcgcttggatttttttccaataatggaacaaacatgttttccaataaagcctctttgtcttttggaaaaataaaagatatgccgttatcctcttctatgtattccatgatttgttttacagactgaacaggatgataccacaccattgaatctccatttctgaaaccatagtcaacctttggatatacacgatcattttctccccaatctttccattcaatatatttcggataatatatacctcccacatattcaccagcatccatatctctcaggctttttccactttcaagcattgatgatagtgctgttatatttccccacgtcatggcaatctcaatcttatcagatatagatataagtacagccttagcagttggaataacctctaccccattacgaaaatatcttgcatcatgatatttccgaggataaccggagtctgcagatggaagctcagcatgcgatatgatacgttgattccttattgtcttaggtaatttgattgtataactattattgctcacaattttactcaagtctgtaaaaatattgctcttgaaattaagtgtaatcttggtattatcgtccaagtctaccaacttaccatcaataaatagcatgtcatttctcataagctttgtactcttgtttctggtaatatgattgttgctacgaaatcctgcaatacggctcttgtcttattgaagttaccaacagatacattcaccgccttccagctatcaactccattcacatttttacctgcatacatatcaacgatgggtgacaacgcgagttgaaacaagaagtcaaacgtttcagagtccactaaaggagcacacaccaacaatgtattctcttctgtttttctctgcttacgtcctgaacctccatgatagccattaacatagttatagtcttgcatattattacgaataaattcaccatcattggcaatttgtttactctcatcaccacgtttaaacaaccaatagcaataaaagccatgacgatttatccaacgtaaataaattccatccgtgcattcatcaactaaaagcctcacgtttacagccatattcgtcaatgcatgaaaagtaaaatcaaatgtattgtcgaacacgtttgcccccacactcgttcccggcaatttcaatacgacctcattgtttgcatcaattccattcaaagtaatattatacacctttctttcagacaatgtaatagctggtaaagaaatgctgtcagcggtcacactcacattagcattaccggccgtatacattcctaccgtaaacggaaggtttttaaaccacgtcaatatacgatttccattataccgttcacccaccttcattgccccccaaatgatgaacgtattgaattgaaaactttcagacattgaactgtccgaataaaagtcaatatctacagagaacacacgtcctaccccgctatctttcggaatcgtctgtgaataatcaattttcccaaattctacagtgtcaaatgtagactgcatgtaaaacgacacatcaaaaaagcatgcattattaaacagagccctcttctccttgtatgaaatttcagaaacgatatcagtcaccgtcacctccacgtaatcccaagcatgcccgtaaatgtttatcactaccggattaaaacagaaagatatttcatccggatattctatggttgtttcccctatcttatgagttctcattactatgtagatttatatgtgtcacatcatcaacgagtatatcaaacacacggtccataatgtcccgtattgtttgctccacgtccgttgtatatatatcctcgtacgtaccagagcgataaagtgatgtgccctctgttgctatcttccgggccacaaggtatgcaaatgaccttggtctctccacttggatacccttgtctatcatccattgctgaataatcttatagaatcctttcggtactttccccgaggcacgtcccacctccagaactccgaacgcttgacgaccataaagagtaccatgattatcatccacgacaacgtgcaggctcttgatagttttgccacttgcacgctgcccagcccgtatatgattttctatgatgcgctgccgaagattatccaactcctcacacaatatcgcctttacctctttcctcctatcttccataactagcacatgggcgctccttgaacctctttcaatttcaattctattactattccagtaacatttacatccagcttatcatagaaaacggaataagggacctcatcgcttacccactcaaacagcccgctcctattcaactcacggataaattgaactgcataccctttgcacctctcaataacctcatcattctccaccccgtcaaaatcaaacgccgtcttgtctacaaaagcaatcatgcaatttgggcaatctcttaactgagtccttgatatgacgaacttcccagatgcaggaagcagatttataatggccggcaatggcatcttatccagccgaacgttggcggtcacccagttatcaaataaataggtaactccttccagcttctctgcgatagaagcgattttcctttctacacttatattcattgcttattctgatatatttctcgtaatcgacgttcataacgtattttctccgcgtccatatcaagacacttgtacactcttacccatagaacactctctacctgctcatggtcagttatccccatacgggtagcatagtaatctaccaagccaaacaacccgaacgaaagcttatccactccggcacgtctttcttccggagtcggtgccacgcttgtagtttcaaagagcttggtaatacgttcaacttccctagttacccatgtggagaatcccaaaatatccgctgcttcatacttctctatcttatcaataggcaaaccgaggacaacacgacatggaaccattatacagtctattacattgcgtacggattgcagttccatcaactgacctatggtgaggtcgttcagagtctccggaactctgacacctgcgacaaagtccggtttaggcaactttcctatctgctccaacaattcagcagcattgctcgccacgtcactcaatatcaaaaactcttttactgtcatatctgtcctaattttgcttttggtcttttaggtatcggttttatacgaaaaagcattgccattatcaacatgtcgaggtaatccggagaatgcccgagtatatctttcatattctccttgctgattatccctttcttccgggtatcggcatctatatggtcttgcttcaagacggacaattcttccattatgcgctctctttgcgcttccgtacatataattcttatctgccgattatttattagctctgcaagcttaaatgcacattcagatttcaggttgtcgtactctggattaattggtcgggtaccaccatgaaattctttgataccattcaaataactttcaaggtagcttccaagtccatcactatcaactatcatcatgctacgtggaatcttccactgtatcatcatgtttttaaggtccgtctcaatagatttacccgtgctatattcctggtctaaccggatataacacacattacccacccagtgccccccgacaaaacggtcgcgtcctttcatggcaaggtcagctgctcccgtcgataatcctatcggttttacgtgctcatttgcgaataggtcacaaatggcatcataatcacagagtgctgtcgggtcgttgtcatactcccaattaccatagtacaagcgctcctttgtcactttgtccctggtattgcggagcgtatctatgtagtcctcggtagcgtagggattatcctgcaccaatgcttgaataaaagcgtatggggcttccagcttgccttctttccacggtttgtagaactcacgataaagccagttcttctttggattgcaagtgataagtatcttcccggatattccatacacatcattcaagtgccgtcctatacgcgtcttcaaaacctcaaatgcgaggtagtgaacctgcccggcttcttcaatccaccctccagtaaactccttggagcccaatcgctcatacatcgggtctttgacgggataatatgtcaagtcaagaaagatgatttccgacccattccctaaaagtataccgtcattggtctgcttgtagtcagtgaatcgatgccactttgccaccttgtcgaaagtgacagagatagactcacggctatctttcaaattatttcggccagcgaaccatcgagtgcccgggagatagtaagcacattgcataagccattcacacccaagccatgactttccacctccaccagctccaccataacacagaaatttcgtaacatcgtcacgaaggtagttataggctaacctctgctttatattgaccttatatcccattacttgactttctccgcatcttctgtatatggtagaaaattaaatcctttgaactcttttcctgcattcgtatggtccacttcctgcttgtcagcaagccctaactttcgggcaatgatattcgcattgaaagctccaacgcacgctccttcaaactgctgcgtctcgatggtttcctccacgcgtgcgatgacctccaaaaaatcttcatcattcttatttctacattctgtacgaaaggtgctccaccatttggatgaagcgcctacataaatacagaatccggttagggaatacggacgagaagtcggggaaacttcttgttgtacttgttgctcattgactgtctccaccttcttccctttcttccttcttaccggaactgtcttttgaatggcctttttagataaccatgggttttcatcgcaccattggaaatactcacatgccgcctcccataagagttctggcgtggaaaagagcttatcccttccgtgcttacttcttaacatccaaaatttatttccagttggtgccgccatcttattttttcttgaatcgttcgtctaatatcttaggaacagtgttattccaattaatcacgtggtgcaatcttttcgtttcctcgctatggcccatcacgcccaccttcacagaggatggcatcatcataaccgtataaaagctcttgacatacgtcccttgactcatgtatatatccgtcatacctcctttattcttctgtgtctgcttctggtttagcgccacttgtggaacctgcagaagcagacatcccctgctcccaagtgtggtataggtgttcacatcttcattaatgcgaccaacgaattggaacggtctatctacggaacagatgaaagaattcatcgcttttcgtttcatcttctcgcctttcaaaatatcgttctcctttcctcctacaaaatcgcctctctgagccatagccaaagtgagagccggaatactttcataaaaacgtagcatagcttcaaataccacgtccaattgctttattgccctctgtttgactgtaccatctctgccgtaagtaaaagaaaaaacatcgtaatcatcatccagttctatgaagtatttgtaaccaagtttccttgctatctgaaagcaagcattgcgcgcataaacaatagctctgcgatcatcaaaattatccgcttcatcaaaagtctttgcaatcttcggtttatcgaacattataacgtttttatatttcgcgtaataatctgcggccgccttatcttcattgtctatcacataaacaattggtcccgtatagccacacttccgcaaagtcttatctgtgatgacggaatcggcacggccatgcgtcagtatgaacgctacaaaatcactcctcatcttcggtatcctccagcattatttcataaatatcctccttgaaccgagaataaccgttctctatcgccttatcaaaatctattattaccagtgcagatgcctccatcagttcctggacttctttatcttgatgagcatagaactctgctatctgtccgtaatcaaatactatatgcctcaatgctgctatccgaagaaattccttcacacagtccgggacatctgaatcgtctattgccgaaagcagttcttcatatttacttttgtcatagagagaatctatttccgggcatacagggcttttaggctcatacaccggagcttcaatctttttcgtgtatttattccgggcatcactttcactatctaccagactatcatagtcaaaatcaaagtttaatccccaatccatcaaagactctgcattccactccttcaatagtttttcgtcccatgtaccattattcacgttatcacggataataatctcccgttctcgttcttctgtcaacccatgaagcagaaccgtcggcacgtcagaaagtcctagttccacactggcatcataccgttggtttccggctataatcaccagttccccagtccggtcagagagtatgatggtacgtgcctcgaagtagtccggattactatgaatagactctttgagtatccgcatctgctcctctgatatggttctgggattgttacccagttttttaaggtcttctatttttctataaattatctccattggcacactattttacgttacgaaaataaagataccgaataatccacgaacggactattcggcatcaaagaagttactgacacgatttggcagaagattttgctttagccagcaataccttaaataaatcccaaccttcaatttaacaattacaccgttaatggttaacaagtacatttaccagctaaaccatgttataagatggctgaacaaaggctcataatttgcataacttccacaaaaccttacctttgcaatgtgtttttcatagtattagattaaggttaacaaaaagattggctgtccgggaggatagccttttttgtacatattacaggctacatctcaaaagcaagttgtctccaatttatccgattatttggaagactttcattacatattgtaccaataaataagatattttactcctacattatctttaaaaatgtttccaccatttgctaaagacaatatttatttctacatttgaattttaacgaatcaaacaatatcactaaatgtaagaatatgaaaaagtttttatttgccatattggcatgcacaattgcacttggctttacatcatgcagagagaaaaaagcaaaagacaaggttaaggatcgtgtagaaaatgtaaaggaatctgttgaagacgcacttgaagaagcacaagaacagattgaggagggagcagatgatgtgaggaaagccctggatgaagccggggatgaaattgaaaaagcaaaagaaaaactggaataagagttgtaaaaaaggccgtcctaattttatacagtaaagatccacctaatttaaaaacattatgaaaaagattaatttactactgctttttctcctattggcctgcaccttgcctgcccaggatggcatttccatctttattggcagagccaaccgctacgcagccgtggaactttctgattacagaaagcgcctatgtctggaatacaatatttcaaaccgttccttggacgattactacagacgctgtggaaaagactggggaaatgtggggattgcacttgaggtagccagaacttccggaaaaaagatgcatgatgtatgcgattattacaaccggtatcaacgttacggatggaaccgtattcttgtggagattggcataaatccgggaagtgtatattatacccctttctatgacagagtccatcaccatagtgactgctggcatgaatattataattcatactgtgagcgccatgataaatttcaccataagaaacacaaatataaaaaaccgaagagacaccacaagaagcactatcgatattacgatgatgatgacgatgatgatgatgatgacgattgatttggctttgaaatccaagcattgaaacactaaaaaagaggggataagcattaaactatgcctatcccctcttttatatcaatgagatttctgttccgatattttcttcaaaatctgtacgcagccccgatgttgatgacaccctgatcaaaatcactgaccaactggtacttaaattcaagattcatggcccaattacggctcaatgcaaattcggctccaactcccaagtttacaccgaaacgacattcattatgattcccatcgccatccacatgaacatgatccccatcccagtcaacatcatacatatcaaacatccagttggacaaagtcaacccaaacagtggataaagcttgacattgctagctaccggacacagataatgaaaattcacgttcacatccagcatgcttacattgtcattttcaaaaaaataattaagagagggctcgatacgtataggattggttatattatactgatacttgattcccaatccgatactttcaatttctgtaccataaccaagaccgaaacctatggcttgtttccctttctgcgcataagcacctactgacaacaaaaaaagagttcctaataaaatgaataattttttcatactacaccgttttattttaaaacagataaaataatttatagattgtctacaataaaaaagttaaactattaataaaaatatactcaatcaagggatcgtaagggaactatttaaaatttataccccagagtaataccgatattcgcattgtgcggagcatccccatccataatcttgcagaagccaagctgtgtgtcaacccccacaagaattcggccaaactctaccccaagaccgatgttccaaccggcatcgaacctattgtaattcaagccgtcatcactgaatgtatcgactttctcatctccattgatattgatacctccaacagatgccttgccatcgaacttggctttaccacctaccccacaggcaagatacggccctgtcgcaatgaccaggttagtattgtctgcaatattgaaacggaattgtacattgatgggcaattccaaataaagctggttgatcttcacatctgcatccgcatctacgacgctaccgctatatccacttgaatatttcgcacctttctgtgagaagaatagcgagggctgtaaggaaacaaggccgctgaattggtattccattcccactccaatgcgtgctcctggtttaaatttggaatggtcagagttttcaccgatgtaactgctgagattaagaccggcctttacattgaaagacaattgcgcaaatcccatcgtgcagaacagcgcaaatagaacagtcaagaaactttttttcatcataattacaaattaaaaaaatattaggttgttattcttgtcaaaaccttctaccgcttttttgtcataaacaccactaacagctataaaagctgaaacagttaaaataatctttttatatcatatcctaattaagaaatacttgcaaatctatatataaagcttcaataaattagcaaccgataatgtttaaaagcaaacaaaaggagtttatgatttctttttcggaattaatgaacagtatagcatacttttcagagcaaacataaagcttcaaattcttgataaatggaaactgttatagataataagctcaatcttttgcgtgatgtagagtgagctgcgggaagggaaatcctattccttcttcattaaatgtagtataaactatttcattgatatcatacagtacactccagtagtcagcgctttttacccagacgcgcaccgtaatatcaacgctgcttgcactcaatgaacctaagacaataaggggagccggtgtatccaatatacggctgtctgcattgattatgcgctgtaaaacggctctgaccctctttacatcctcaccgtattcaacaccgaatacccattcaacacgacgtttgtcctgcttactgtaattagtgacggcattaccactgagacttccattaggtacataaatcatgcggttgtcaagagtggaaagtatagtgtgaaatatctgtatttcctttatcgtaccacttactcccggaccgtctatgtagtcacctactttgaacggtttgaaaacaagtataatcagtccaccggcaaaatttgagagattaccggacagcgccatacccacagctacaccggcagatgcgagtaacgccgcaaaactggtggtctccacaccgagtttgccgattatggcaaaagcaagaatcatgttcagcagtatctttatcagactcttcaagaaggtctgtacactggtttcaatctttcgtttttcgaatagcttggctactaatgcacttatctgtttgatgatgaaacgtccgattacatagattaaaaaggcaattaatatgtccttaccggcatccatgccaaaatccaccaacttttccaatgcctgttccagttttcctccagtagtagttgtgttcaataaaaataaattcatttccttacaaataaaataagattataaaaacagagttaaattcagtgtgcaaagataaccaaatctgaatggctaccacacatatacaatctgtatttattcacaagaaaaaagacaaaacttattttcatggcttattccctttcaataattccgggctatcgtaaatattactgacgattgtcatagtctgccattcgcctaaaggtttcatgccgacttctttttcaaaatcgaattgtaatgcgaatgtcgcgagttttttgttccacaatacaagagctatccattgaccacatacaagtatgtcaccttcgtatatttctttcccgttcttatcgcacaagccggtaaactgcccaacggtttcagcccatacgtcatcgcaccggcagtcttctggggaatatatcttcgccttgtccgtgaggataagcccgttttcgttccttccggcagtatagaaaaaagagagaaatccatatatccatttccccgtatcaatgcttttccctctgaattttatttcacgtttcataatcaatactttttccatgtttattttctctcaattcattgtatcgcatcttctgctccacatgccatataaggtctatgttcagatgtttggcaaacccgaaaatagccaatagcatgctatttaattgattttctaatagactgtcatattcatactcacaccgtataggaattgtagatatagcgtatatgctttctgtgaaggtctcattattgcagctttctgttgcttcgtatatcatttcacctgaaaaatcatcaatggatatatttcttaatccagccaaatcaagcaggcgtatgcaggcgtcggcaagctcgtcttccacacagtctttgatatatgtttcaaagttttccgcaaaatacttattttgataatgaaaagtccgttcgtcaaatattgtaccttttttatcgaccggaactttggcaaatcgtcctttcctgtcagctttcacagcttccataagctcggatatgacaaggcaaaggcagtgttcgttactcagttcttcatcgtgaaaaccgtgcgttactgcgttacggtaggctttatctcttaattcatttaagttcatgatatttgggtattaattggttggaaatacaatacccgataaccgccacaaagcagtttccgggtattcacaaagcactgacaaggattgtctgtagaaattttacgctggttagttatagtcgatgtttctatctaacaaacgatgtaagaataattttgatacttgaaaaactcttaatattgattgtatatcgaatccatattaatctcattttattgcgtacggataccttaaatcatgaatatcgacaatatccttacacaaactatccaaagaaggcattataaatgatcttgtgattcctattttttcaagtttactcaatatgttttgtttatattgtacagggattatatattttgcatagataaattcgaaattttccttccaaggttctggataaagtacaaatatgccattttgatttttatacctaacatctgtcatattaggaactaataaagttattgcgggaaatgaaagtatgtcatctttatcttcatcgaaaaccatcattgagaatggacaactatgataaacaactccatctttatcaaaatttgaacaacatgcaaaatataatgcaatcaaaggattataagtccaatcaagaagtctcgttggaagtccatagtgttgtgctagaaatagaaattccttatcatttttagggcgtgcacccgtaaacattgaatattttcttttaaaatcctcaaatacctccttctcatattgcttcaacacgtcctcctgtccttccttgaacctccgacctattgaaggtatcaatttatattcagaagaagattgacctctgaagaaatccatttcagggaggccgttttgtaaagacataaaattttccaaggtttgtacagtaaataccttcatcactttttttattaaggttataatatcacttaaattctacattcaagtcgtgtattcactgcaaatatacgattttaatttacggaaactcaataaagtttttctgctattaaaaaaatcaaaagataaacattaattgtgatagagataacttttaatatcctctcacttgatattaaacttgcccatggttgttttatggttattgacttcattgcattgaattttaaagattaatgattatttttgtaatcccaatagcatctctgaaatacaaacaaaatcagagggaaaactaatgggttaaattaatggtaacattaaattatagacatcctcattctttttagaactgttagaatgaggctctgtctcaaaacagtaaaacagtccagtgttgtagcgacaaacctgtacatgttcgttcctattacagattccggtttggcaaatgtgaacacgtgagagaacattgtagaagactaccttgtagtcatcgttaaaagaatcatctttccgaggatacgtgacaggtatcctcgtttcaatctcctttctctttaattcattattgctagcatctcatcgaaaaactaaataggtctccaatgagtaacatatccagtcttgatgtaggggtatatccatttatccacttctcgcattgccatttcatcaatactaccatcaacaaatttcacttgacacatgccttttgcttgtttgtttggtattgcatcctctacgcttatccacggtgattgctttgcctgccattcgacaccttttctgaacatgtttagcattgcttgttgctgatatgcaaactcacctttaaccactattgcatagcttgacataagctcttgccatgcagcttcttctaccgtctgtttcatatatttcttattgtgagcaagaaccaccggtttccgctcgtgttaatacttcatgtgcagaaatggcttctttttgcacatgttaatctcaattcattttcctttttctattccgctcgctctgtacctctgccatacacatcttgcaccatgacgctttcagatggtattccttaccgttacgacgggctgtcctatcgaagaacctggataacggaagtgctctaccgcaacgggtgcacagtttacgctccactccgtcaaccaccacccggttacggggtttcctcctcacaatctcacatggtccgcattcggacgcaccgtacctcctgcaatatgcaagtgagtgcttgccgcacttggcgaaggaggtgcaatccgaacggggaactatctggtgaatgttcatacggcatcattcattaagtcgaacaatgtgggtgcactgacctccatctctgcctcatacagatatgaaagactatctttccagtagtcgtaattgagttcggttgacagacctttcctccccagattgatagcgcaatagggaacggtgccgatacctccgaacgggtcaaacaccagttcacccctgtttgaataccgttcaatcaatctttcgacaatatccaactgaaggggacaaatatgattctgccgtttcttctgcgactgcttagtattcagcgtgcgcatccgggtgacatcatcccatatccaaggcttcttgcttaccgggtcaacggccatgaatgtctttggcagttttccgtatgcctccagctcttcggcgaatgatacgtgttcctcataatcatagacgtgcccacgctcgtagttcctgaataggtggcgtatcttgtcaatgccggcccctttcatgtcctcgtaactcaatagagagttacccgaagatttccaacttgcatgagcgtctatctgccaacgggccaacgaatattcgcttttgttcttggtcaccggcaaatcagcataagcccgtgaggtgtcagaaggaagcttgcggaaaagaaggacatattcaggacaaccgatacccatctttgaaccgtccttgcacatctccgtatatccaagccgataagtctggttgttctcccttaccacatccgtatccaccgtgatgcgccccatgtagcggaaaccgtgtttcatgtagtggaatacagtcatttcactgaacgggtcaatggtaggcataccgtcaccagtagcgttgccgaacaaaacacggtctttcacatggatgcaagctaacctaccgggtttaagaatacgcataagctccggtgtaagataatccatctgctcgaagaacttgccgttgtcctcattatgcccgaagtcgttataggtcggagtgtactcatagtggttggagaacgggatgctggttacaatcaagtccaccgaattactttccatagtctggcattcaagaacattgtcattattgattgccctccacagtttaccggacttttcttccctgctagcaaacatccaccgcatcatcttttcctctgcctgcaagccgaacaaaccgttctcgcggactatatcggtcatcttggctaccatctcgcggtgttgcgcccacttctgcatgaagctcttgtatatctctccctcactttccgcatagaccagataaaggtcaaccggatgctgctgcatgaaacggtagatacgggctatcgcctggaacttgtcgttaaaacggtagtcgatgaacatgattgccttatggcagtggtactggaagttcaaaccttcaccaagcatctccggtttggcggccagatatttcagacggccgtccttaaagtccgctatcacttcgtcggcttcctcatcatcctgcgagccgtacacagccttacatccgggtatggcatcacacaaagccttccgttcattctccaggtcatgccataaaaggaaatggtcgtctttgttttcaggacggttaatgatttccaccacacggacaatcttttcctgcatgttgtcccgacgttctttcgctgcgtcggcaagtccgagagctgcctcacggaacatcttcacttgtccgtcacggtcggttccggctgtggagttgtcaacactaaccacttcttcatgtacacgcagttccggcaattcatatccggtatcgggataaccaaggtcggacggtttggtgaggaacaacgcccatgtacttacccacaaccagaactccttctccttgtgcggataaagggtaaggttattcgccttcgtgctgtcacgctgaaagaaacgggtaagtgcctgcccggtatccatcacaccgagataaccggcataatgtatcagttccttatatctgttgggcgatggcgtggcggtggcgacaaagcggtagggaacattcgcaaacaagggaaggaactcctgataggtcttggtaccgaaaccacgtaatacgctcgcttcatccaatgatgttgcggtgaagtaggaaggttctattcttacaccatcttcaccgtcgcgcacacgctcgtagttcgtaaccatgatgtcagtcgggcatatcatcacatcagccatagttcgtacataggtcactttcatgtgcagatgttgttccgcttgtgtaaggaactcaaccactacacgtttgggacaaactatcagccctttgccgcctttgtgtttcaggactacccgaagtatctccaactgagtaacggttttctgcataccgaaactggagaatatcgcacggcaaccgccagacaccgcccagcggactgtatctttcacatggggatataacgacggtgtcagttcatccggattgacctcgaacccggtctgacagctgatggccatcttgtcttttaaaaattctatatattctttcattaagctacttcttttaatttcttcaatcttaaatctctaagttttgcacaaagtgcttcggcattcttctttgcctgtgtaacctctaccgcatttccgataaacttcttctggtcagcttgtgtaccaactaacacataatcttccggaaagcccatgatacgttttagttcaggaatgcgaagcatccgcattttaatatccactatgccatacagtgacatgaactcctttatcttcacggtcataggactatcattgtcgtagatttcaatcgctatctgaccgctttctgttgctaccagatagggcggcatcttatccattcgtgctatcagggtgaagcaggggttatcaacggagctgccagcactgttgaactgtggattcatcagataatgccatttccggtttgcggttattgtctgtgccggttcctctatgttgctaccaatatttgagaaagaagtattcataatccaaggcttgcatgttataagtttttgcttgggattggttaaaattgccggacaaatattatcaatacttgtatgttgtcctccaccggaatactcattggcgataaaccttggagttactaatgataatctgtcttttgttgtaactgtcgcagacggctcgtttaccgaacgattaaagccgttcccatagtgcgctgatacgaaggcatgatggtccctgcatgtgattgttccggcaggctcttccactgatacattcttgctttcgggatgtccgctgaattgtttggaaagaaagcaaacttgcgctactccaagtctgttttgtgttgttaccaccggacatggttcgtcaatcccaggagcgttatatttccccgtacggttcatagaattatacttcacgaggaaggcatcctttcctccggctacaaacttgataagtccgttatagatacgctcaagcgttttctctgcaagaggcttttccctgaagatggtagttccttcatcagagaaatcaagtacatcctttaccggcttccacttctccagccgcgaaaacatatcttgcctaccacccttacagtgggtcggttcagggaatactatcggcaaactctttttagcaaagatgccgaagaagcgttttcttgtggtataggcgccgaagtcggcagcattcaggatacggtgttcaaagttgtaaccatattttttcacgttgcgtacccacttctgataaagtcttcctttatccatgctgataggtttcccattctcatccatatctccccatgacataaactcttctacattttcaatctgaatgtagtcaggggctataacatcaatataacggaagagatgttctgccagcgtccggctatcagcatctctcggttgaccgcctttagctttcgagaagttggtacactccaaagaagcatgaagcattatcatcgaatcaggatataattcacggatacgttcaacaatagtatttatcggtgaaagctccagtgtacgaatatcctcaatgaaatgaagtgcatcaggaatgttggcatcatgtgaaaggatagcattcttatcgtgattcacacagcaaacgacttttgcacatctattgccatttaaacgggcttcttccacgccttccgacaaaccaccggccccacagaataggtctatgacaaataattcaatgtcggacaacccttctaagctgcataatatctctttcaatgatttcataactcaatcaatctccttcggtttccagtcattaggaacttttgcccattctctgaagctaccattggctacggcggcgtcaattagttgttttcttggtttcataatcgtgtgtcttttttcatcagttacaagtaagtccttaaacaatagtctgctatccagtagcagacaaaataaaaagcggcatatactgccaggattgacagaatagtcgctatcagtttggtctctttcatttcaaattcagttttgcccgtaagtcgtcgggcggttggtgattccgttttaccggagcttgttgttcctccaaagcttggttattgcgtcgacgaatgataatatccagttcatctgaccgttcccgaagaaatttccgaaatgcttcgccaacggttatcgtatcgaaataaccatagaacttaccataccttcccagcttgaaccgtgcgacaaacaatatgaactccgtcagtttgatgtagtgatactggctaacgaacagtccagagaactcattcaaggcattttcatcggccccctccttcgtggaagaagcaaaatcaatggtcagtaactgcgtctttacccacagagacgaggaaccatatccgtacatccgttcaaggtctgacagcgtgggagacttctcgctgtacgctttctcggtatctgcaagaagcatagactggagtgatgtcgaatatacggcagaagccttactaaaggtcgggtatttctccttgatggctgatagcattacttccctgctcgatggctgcatattcgtcaaggaggtttcttgcctttgctgccttatcagcatcccgattgttttgtctttgggcttgattttctgtttttccattgtcctgttgttttttctcgattatccaaagattggcccgactatcccaacgttccaccttggcaccggtagcagttttccaaccgagaccggaaaagtgattgtagaaaatatccgcttgcagttcccaatcgggaagtttatcacggaaatactctttcacctcttcggcggtaggtggaatgaactctaccttgggtttcggaggtttctttttcggaggttggtccggtgggaataactcgccagaattacccacctgtttttgtttatgtttatgttttattatctcggcaccaacctcggcaccaacctgcgcaccaacctcggcaccaacctcggtaaattttaccaaggtgtacactacattcgggcttccattcttcgttttgaagtcaatcaatcctacttgttttaatctattccgagcatttgacaaagtctttagagaggctatgctaaggtctgcaagaactttaccattgttacggttaaacgtattcgcccacctacagaggttgttagtttctaacaggtagaaatacaaagcggtttctgtgacagttagcgaatatgcgttatgttgcaaccagaagttctttattagctcaatatagttcataataggtaagaattgacttcattcataaactcagtaagagaatggcataccacatatttatttcggaatttttcagcctctctctgccatcttatctgctcctcgctttgtttccctttcggtctcttcatttcgatgcaaagagcggaaaatcctttcttaggtacaagcagtatcaaatcggaaacaccccttacacttccctcgtacttcatttgtgctccagtcctggcatcacgctttccaccgttgggaacggcgaacaacataagactcaaagacgggtattgaatccggaaccaagtcagacagctatgctgtatctgactttccgattgcggtgtagtctgtctttttctcataatttacctttgaataagtccatagccatatctaccacattctccttaaccacatcgtccgttccggtgacaccgttagctatgcctttcttccgttggataacaccatacatgtattcatcaatggtattcctgccaaggaaatagtaacagttgacgttattcttctgcccattacggtgtgccctatcttctgcctgctcacagtcagaaaaagtccatgggaactcgatgaaggctacacggctggaagcagtcaaggtgagcccggtaccgcccgatttgtagttaaggataatcaacgtacaatccggattgttctggaaagcatcgacggccatctgtttctgcgtagcgttatcctcacccgtaaccgttacagctttgggaaacatcttcttcagttccaacactacttcttttaggtaggcaaagacaatcagtttctcgcctccatctatcacgtcatggatgaattcggcagccgccttgattttcccacgtgcagagatggctttcagaatgcccatacgaaccattacctcgcccctcatggacttggctatcttctcatcatccgcattcttgtagacacgcagatattgtatgaggtcgctttccgctttctcatactccaaccgcgtagtgatatccatctcaatatactgcctcgtcttgtccggaagctgggtcaataccttggctttttcacgccggaagaagcaggtattccaaaggcgccagttcagttctttcagattggaggctttcttcggcccattacagaaacgttcggtgaatgtcttataccctccaaaatcctccaaccgtcccattatcttgagttgctgtataaggtcagtattatcgtttactaccggtgttcccgtcagttcaagaatgaaatccttgcctttacaaatgccctcaacaaacttgctctgctgggtcttggtagacttgcacttatgcgactcgtcaatgattacagacttgaaaagggttatacgtgggtcaaaggtgattgatttcagcgtaaaccgcgtatcattcttcacatccaatacaaagaactttttcaagctctcgtagttagtgatgaagatgtcacaacacttggtttcaatgaagcgctgccaagtatttttgttcttgtcatcaaggattagcgcttgctttccagcaaatttcttgaactcacgctgccaatttattttaagtgctgccggacatacaacaaggcacggataggattttgcaatcgtcaccgtgcctattgcctgcaaggtcttaccgagtcccggctggtcaccgaagatacaccgtttatgggccagagcataggctatgccctccttctggtaatcgtacggttcaagtagcaatccgtggggaacggtcagctgcggcatcggagcaatgtcaaagctcatatcgacctttctttgctccgaccgttgtacggaaccgcagaatccctgctgtaccgcccatttcgccattgtatcaacataccattcatcagccaagtcaacccaccacgccttttcattgaaaagatatgctttctttgcgttagccttgactgatggaatattgttcacgcatttaaccaacatcggatgatacatgaatttcagtttgaagccgtccggatatttggtgatacaaaaaggtgctgccatatcaagctgccggctctttaatcttcacttttttacttttgtttctcggcttcactttcttcccgtcaatcgtcagagtagtgccactctgttccaccacttgtttaaggaactcattcgcttcctcttcaaatgcagcatctcccaccgggtcggctgcaatgtccgtaggaatatccccatcgaacggaagttcctgctggactaccgcccatttcttagcggtaagatactgttccacctcataattacatgcctcaattgcctgctgcagttcgaatgcatgcttatattcctcgttctcattgttgaacatggtaaacggagctataaggttaagcaccttcttacttttaagaaaacgttttccaaccaataccacaccttcattgtcatccgaaccgctaactgtgtagcccgtgacctcgaatgtagagaagatttcttccggcagttcatctatggagtcctttccatcagcttctttctgctcacagaggaaagcaaggtgaggaatcaattcgttaaacgctgcacgcaaatccttatggataagattctttccctcaatggttacattgtcctcattctcgttcttgaaagaggcaacaagcgtgttgtctttcgtgatttttgctttggtgatattcatttctacctcctgtctttatactcgttgataaattcgttatagtaacggtcagccggaagagggagcgttattcccagttcggcagcagcatcggcctgaaccttatttagaaagtcagtcatctgcactgtattgagcttcgatgtgcttccggcaatgaccatttcttttcctctgaaatacgaagtccttctgagaaagcggttacaatagtaatcgtgtacatcctgcttgtccgtcccggtctcctgctcaatacaagtaaaccacaaccacataagcgcattctgtgacagcgtccttggctctgtgaacctttcgatttttacacgataccgaccattacgaagctgggaacacatgaagtcaaaagacttgcttatgtgtacctcgccgttgaccttttccagaattgcttcttgtgccattactctaatccaaagatttttttatcagaaataatgtctcggtttgcttccaaaaactctatgaaatgctcgcagtgtgccgtaagcagcttaatcgtctgttcatggttataagtgtagtattccgggtattgcgttccgctaattagtggcgtccggctggtaccgcccttcatctgataggcagtgtactcaaacgctttcacgctttccatctgaccggaagcaatcagacagtaaggatatacatggcgctgccagccgtgttcatacttgccaaaatcatacttagatgttgtcttgatatcatatacggtatcacgaacgagctcatctatatacccataaagctccacatcaccataacgagtgggaatgactgcggacacaaagacttgggacaatgcaccggagaaatacttcgactgctctatacaccagctacggtcaaataagaaattacgctctggcgcgatatcagtagcaggaaaatatacctgaatggtattcgtttctccatcaccgataatggtgtatggctcccgttcgcttggtatatgctttttcttgtggatatagcagtctataacagcattaaaggccgttcctttatcagctgcctcactctcaaacgggacacggtttatcgcatcaagtaggctttgcttcagctccgcttcaatttcttccggacttttcttgtattctcccgtttcattatcgacattccagaagctctctacctgctcatcagcccgcaaatattgctcgaatttatcgagcagtgacgggtagaatctgtatttaggctgctggttcataccttttgctgagtttgttaaacttcaagccaagtctcttgcacttctcattgagcatcatgcctgcccgtaccttgctgtcaaagatatgcgtcatggtatctaaagcttcccgaacagaattggcagattgtgtatcagtcacttgttccactgcgtcacggatagcatcaagaaccgcatcatattcggaagatagttccgtctgcttcgtctgatactccttataagtactgatgattttcgtcatgaaatcattctcacccgttacggtaccagactcatcaatgattacgggaattttgatacgtgaaggaagattacaagtattcttcccgtagaacttctcgcacgggtcaaaagaaatagttctatctttaccgatagcttccatgtaaccaaccaaatccaactccttaatcaaatcaccggcagatgagccaccaatctccggacgtatctgtttttcgtcgcctactttctcctcccgttcatgagccacgaagataacagacttgcccatgagtgtgacttgattaacgaagttgatgaacatgttcttacgtactccatacccctgcagggaaagggtaccatccgctttcttcatcttcggattcgctgccataatcgccttatccataaaagaaagcatctttccggcagtatcaatcacaatagtggaaaactccttgatttcttcggacgaaagtacctggttcgtctcgtcccagcttgtaatctggacggtcggtacacgatgggcggcattgacacggtgaataccgccgtcataatcgaacaataccggattgggagccgataatgcaagagttgtttttcccatgccaggttggccgtaaatcagtgctgacaaggtagtcttaacggtcagctcgttaggtcttttgataagtcccataatagaaaatattaaagtggttaataaaaaaatagccaaaggaaagccccgaagcgtattctccggggcgcaaacgacaaatactcctaatcctatccgatttcgcattacctttcagatagagtcaacggctaaccgatgctgcgcggatgattccctgcgctatcttcgccctactctcggactaaaagcggattttctctcataaaggcttgtagaaacggatggattcgaaccaccgaccgccgcttgtggtgctctcccattaagctaagaatctacttgagagaatcgaactctcaaccttccaccacacacggtgctctatccactgagctacgttcccagaataggtgaactattttcacaaaccgttcaccttgaaacacaaacaaaaaataaaacacgacaaaactactaaataaccctctcttggattgtggacgttgacggactcgaaccgccaatctcctcaaatgagttgtgttagccattacaccgaacgcccatatttgcctaccatatcttcacagactgggcaggcaggtcaacaaagttgctcccggataggcggtcaagccacaccgggatagtcacttaaaacaaaagcaaaataaaaacttaaatgaggactctcacctcacgttgtcctttacaacggaattatagattaaacaataaaaagcttgtggacaatgcgggatttgaacgccgcgacctgtacatgaaacctttaaacaataccatgacaaattaccaatactaactacatgtaccgctctaccaagctgagctaattgcccgtgtctgtccctgctctcacgagtagagacaactcccatgtctaattctaaatcaatctaattatgtgtgaaacacttcctccgctgaggtctatatcttgaacacctttttcaggacattgtgataaaaccaatacgaatacacaaggccaaaaaggtttataccataattccagtctcccgttaccgagtctacatcattaaacatcaataaacatggtagtgccaatacgttaagcagtagcacgtttataatgattcttcttttcattgttctttccctttcttacttttgcaaagctcaacacatccgaagcattgtaatagcttctcccattagatttatactcaactctcactctttgagtatttaccaacactcttaacctgcccggacctcctactattttttcagattctctctttgggaaagtgcgcttatccataatagtgaggatgtctgccaatctcgcctccgctgtcccgtcaatcaacatggaactgcgtaaatcaccattcacttcgtatatcataccgttaaaaaataaagtcgttattattctttcggccagtccttatatatcgcatggctgtccgtacccgtgatggtattctcattctccgtaaatcaatatcattgcaagtgacctgcatcaataagaatagaatggaaaataggaattcaagcccgtgtctgcgtaattccttcaaatcaaaatcacgcttaagcctatcgcaaatcatatacagaagcagttccgtatctttggaaatacccaacttccggtatatcgttcttttctgggtcttgacagtccaaaccgatttattcagattgcccgccacctccttgtcggcaagccccttgcagtactcattcgcgacaagcagttccgtaggagaaagggaaatcatcatgcgaccctttccacatcaaaaatacctttcctcttgtcaacctcccctactttccagtcagcatcctcaacgcagaactccaatctcaatcgggggataattgtcccctttatggaattatacgccttaaccggaaaagttagaacttcccctacctccatatctctcaaagccggagtgtagttttctgtgattattcgctttttcatcgctataaaattttaatgattagtatttgagctctcccgagccaatctgattggcggcatcacgctttattcgggagatttacttaactttgtattgccacatttaaaattaagtaagtatgagtaaattcattgaaatccctgttaacggggaaaagtgcatcatcaatcttgatgcaattcagagtgtatgtcctctaaaaggaggtgggtgtgaaatctacttccttgaaggagccttgaagagtgtcaaaacccaatttccatattccgagttactaaaactcatttgggtataattacttcttttctgtatatcgggattgagaacaacttgataattactatgcaaggttctctcccggtatcactcttactgacaaacccgctatttgcaggaagtattgtcacttgcttttctataattgctttcataagttcgtttttactcacgtttattaaattatttactcccctctctatagttcattcagaagaaacgcatcttcaccattttctgtcttcacctctgtaattagggtataagctgtagaaaccaattgaaacatctcagggtgtctccttatgagtttagtattaaggtaattcctccaccctttgtgataagcataatacatcaaaacacctcatttattccacacacacgttattattacctcaaatccgcaactacgcgcctaatatgatacagaagcgaaaagaatctgcatcgttagtaaaaagggggcacagtgcatcgaatgtcaccataaagacatataaatgccccttaccccaccatgcgacttgaggcaatacgcaaaatcacgactataagttgtcggtgttatccaaagtcattctggaacacattggcataagcattgttgcatgaatagatattcagcacatacttccttgatgtcctgacccatttggctggcacagagatgaacttaaagacaaacgtcttgatgcggcttgttgctttgagtccgaacctcttcacgtcaagcctcgccatgatgaatttatagaagttgcgtatgagtgccataagcagaagaaacaccgtgttttctcccataaaggattttggaagcctgttccagccgaatccgttattcatatcatcgaagatgcgttccttccctccacggaggttatagaattcgacaatctctttctcggaagactcgtagtcatttgtaaggatgcagcggtaggtgtattctccttcccacaggtcgagttcgccgtctatccgcttctgtctttgaatcacaagacggtatgccttccctttccatttctcgatgagaatggaggccagctcaaactcaatgccgcccaattccactttcttccaacctctgagggcaaagatgtcattgtagagcgaactgcatcggttagcacggatatagaaggtcttgcagtgtttagcaatctcttccactatctcttcagaacacgagccgcaatcagctctgaaacggttgataataagcttgttttgttcaaacctttcaaagaacctcttcagcgtgtccttctggtggaaacggacatttgtgttgccgtcgctgttctcaatgccgacaatcaagttgccaataaccgccacgccagggcgataaccaaggaacttcttgtatgtaggcttcgcatcaaacttctcagcctctatgaactggtggtcgaagtcaacgtcatacccctcgccctctttcagctgccctgtggacaataggcaattgaggagcagtgtattcagcttgtctgccgtgttgaagtcgtaggtcttgccagtgtcggatgtgtaggaaatgttatcctgggtcagttcctttatggctctaagaatcgtgtcggcactgcatgtgcgaagtgtcggatgaagcgaaaggtggtacatcagatgagtggtgacatcctcgatgcatgagccgccacaaaaataaacgctcataagcgaacggatgatttcgctgtattgataaccatacagcctgcatctcataccgagggttgagtcgattacagatgagagtctggagtcaaattgctccattattgaaaatattcctccaaaaggagtgagtttctcggatttaattgctacctttgccatgtctgtcgggtttgatacatattttgatttgcaacactaagataggtgaaaaatctgacatggcaaattcctgagcaactttttgttgctcaggtacttaaaaagttatatttgtaatagtgttgcggaattaaggtattactcttagggaggtatgaatagatttaagtttatcatcattactcatttcagttttaattaatgtttgtgccccaataagctctctctgctcttctcaccggagttatcagctactgtacttcactgcatgaccgttcggggcatgtcggcttcctatttcgcaccgttgcaaatctttcgctcgttctgaacttccattcagacatcatcgcaaattcttgctactccgggtatctctcgcgtcctctatgctggaattgagggtaagcgccagtatcgctttctggaacggattgcttagggcaatcactccatctcgttctccgtctcccatcaaagggtaggctcaatgaccggacggagaatctttcaattcgcccatgcaaggctttgcacgccacttgcgcaagtattcatgttaagcgtacagctgttctgcatggtatatgtagctgccttttctgcgaataattatcttaatcgcctacgtaacgggaaccgaaggcacctttgctgttctgattgtagtaagctgaagctggagcgttgcagtaatcataagaacttcttctttccggtcgtaccaaagctgctttcattacttctttctcagcctttctcgcttcttcatcagcaacacgtttcttttcgttagcccaagcgagtttcaagcaatcaccgaaagtctgtacaccgtgagcaagctggtatagcttgaaatactttctgtatatctcgtgagccgctttcataatcttgtgtaaatcgtactttttcattgtcttactcctttttaggtattactttaattttgccaactcaactatttttcattattttgtagtcgttgttgacgttgatgttgcaaagataagatttttcttatatcaaatacaagaagtgatataagaatattcttatatttaacttttattaatattatggaattaaaggactttataacggcatctttagagaacatcgcagatgggattattgaatcgaatattaaattattgaataaaggattcattgtaagcccatcagcaagtagagtaaacgataggacaacacatcaaattcctttagttcaagatataagatttaatgtgtatgtagaagaaaacaatgaaactaatgtatctgggaaaggtggattgagggtattgtcagctggaatgaatgcaaaaacagagggtaaatatggaaattctctgtcgttttccattccagtaatttaccctcaaaattactttttactttctgaaaagacgtttgaatattttccagacaaagataaaggcagcgatagtggccgctatatatacaaggatatataaagtagcagcaatcattaaccaatcaaacataattatgtatgtattaaattcaatgcaaatataagaaaaatcttatcacatgacaggccaagaaataataaatagtgttttatctgaattagatattaaagctccaacattggctgagaagataggggtgctttatcaaagaatatttgacctccaaaaaggtaaaacaaagaaagtctcttctcaactagctaatgctattataaaagtatatcctcaatttcaactatcttggttattaaccggtgaaggaaatatgcttaccgatgctccatcacagacgtaccactccaacgcccgcccagttgacgatttaagctacatgaacgtgcccgttatacacatcaaagcacaatgtggttatctcgccggatatggagataccgaatatatagacaccttgcccacaatgccggtaatcgtagataagacctatcacggaaaataccgcatatttgaagcagaaggtgacagtatggatgacaacagcaggcttgccatctgcgatggtgacaaggttttagcaagggaagtaagacgtgacctttggcttcccaaacttcatattaacgactggtacttcgttattgtacaccgtacaaacggcatatccatcaagcaaatcacggcccaagatgataaaggtaatatcacctgccactcgctcaatgagttattcaatgactacaccgttaaccttgatgatgtagtggagatatacaacgtgattaaggttgttgaacgcaatatgagactataatatcaatctaaaaagtaaaatactatggattttaaagacactattaaacagcttgctgatagaattgaaaagctgaaagataacattcagacagaagaagctactaaaaatgctttcatcatgccctttattaatgctctgggatatgatgtgttcaatcctttggaagtattgccagaaatgacctgcgatattgggaccaagaaaggagaaaagattgattatgccatcatgaaggacgaccagcctatattgctgattgaatgtaagcattggaagcaagatttaaacctacatgataaccaactactacgctatttcaacgtatcaaaagctaagttcggacttttgaccaatggaattatctaccgcttctatacagatttgaaagaacccaatataatggatgataagccttttttggaagtggatattacggatttaagggataatcaaatcgaggaactgaaaaaattccataaatcatactttgatgtggacaatattctgaactcagccagcgaattaaagtacatgggagaattaaaggctattatccaagaagaattctcctcgcctagcactgattttgtgaaaatgtttgctaccaaagtttatgaaggtagaatgcttcaaaatataatagaccaattcacacctttagtcaaacgcgctatctcttcacatatcaacgatattattaatgaccgtttgaaaggagctttgacagttagtgattccaaaatagaggaaagccaaacaaaaaacagtggaaacacatcagaagagactacagaagaagtaaatacagaatccaagattgtcactacagaagaagagttagatgcatacagaattgtaaaagctatctgtagaaagaaagtagatatatcccgcatagtatatcgtgatgcacagacttatttcagtattctgcttgatgacaacaatcgcaaacctatttgtcgtatgtatttcaatacagccactaagtatgtagccactattgatgaaaacaagaaagatgtgaaacatgttattgaaaccctagatgacatctataattacgaggatgatttcttcaagacaatagacatgtatgagcacaaagattgatgtcaattcgattatagcaaatatgaatcaaataattaccgaatgctcatgtcagtggaaaactccaaaccattgttccctcacccctacctgcaaaggctgggggtgtcggttccttgccactcccatagataagttgccgaccaccgacaaggagaaagcaaaactgttctccaaggtataccgggaagcgaaagaaaagggtgtactggaatgtccgcactatcgttcgcttttcatcgacgaggttctagagaacattgagaaaagtaacgttatacaacaaaacatgagctgatttttcctatttattgtcgacatcagatttaaaccagcctataaagaagtgatacacagattatagctatattttcaatacaataagtctagtttagtttttgtgtgaagcacttcctccgtaagcgaacgttggaagtgctttttacatatcaacactatttaatccacaagcagaaaaattatcaaagcaaatttaaaaaactatatataactacatatcaaacaccaacataacattcattttcttatctttaatacagaaacaagtgggcacgcatgttttatgattttactaatcacatctgtataatgttagtttcgcgacaaccattatacggtaataatcttgtaaattatggaaatcaagaaaacatccaaagcaagcctggaaaacaagaagtcaagttggctacttgtaggttatgtaattgtgctggtcttcatgttcgttgcatttgaatggtcgaagcgtgatgttaggattgacatgagcggtgctattaccgagaacgtatttgagcaggaaattgaaattcctatcacggagcaacccgaattagtagctccgccaccccctcaagctcctgcaattgccgaggtattgacaattgtggatgataatgacaatgtgaaagaaacagccattgcctcttccgaagaaatcggtgaagctgtaatcatcaaacccatatctccaaccgtagatgaagagattccggtagaggatgagatttttgaagttgtagagaagaatcccgagttttcttataatggcatgagtctgatgcaatatctgggtaagagtataaaatacccgactattgcgcaagagaccggaacccaggggcgcgtaatagtacaattcgttgtcaacaaagacggcagcatcgtagatgtaaaagtagtaagaggcgtagagccctatctggacaaagaagctatccgtgtaatttccaccatgcccaaatggaaacccggtgagcaacgaggcaaaccggtccgttgtaaattcacagttcccgtaatgtttaaattacaatagcagacatgccagtgtccactttccacttgtctccataaggtaatctccaatatccgagggtgtgtcgaaactggtattcaccacagattacacagatttgcacagataagcatctttgattatcagtagattaagctcattctgtgttaatccgtgtaatctgtggtgaattttgacacacccccatttttttaagtatcaacacagccatttccttcttccatatttttctttccgcagaaaaacaaaaacattcagccctctcagactgttacatagaaaaacaatatatcactcctgataaaaccacacgataatgaaatcacaactctttgacatcagaagagaatataagaaaggcaggctgacaccgggtaacctcaacgacaatccccttgagcaattcgaccattggctgaacgatgctatccatagtgatgagtacgagcccaccgccatgacggtagctacagtctcgtcagacggacatccctctacacgcacagtgttgctgaaaggggtggaaaatggccggctcatcttcttcaccaactacgaaagcaggaaaggccggcaactgactgcaaatccgtatatatccttatctttcgtatggcacaaactggaaaggcaaatacatattgaaggaaaagctgaaagatgcgctcctgccgattctgacgcctattttgcaagcaggccttacaaaagtaaaatcggggcgaggatttcaccccaaagtcacgtcatcggcagccgtatggagataatgcgcgcgttcgtccgcgaagcggcaacatggatagggcaaagtatcaaacgtcccgacaactggggaggttttgccgttacccctttccgttttgaattctggcaaggacgggaaagcaggctacacgaccgtttcctctattcccaacaagcggatggcagctggaaaaaggagaggctggctccctaaatacggacagggaaacacttctcatcacaaataaatcttaaaaggaggaacaaagccacagaaacgctgtttgaaggggaaactctaaaaacaacagttatgaattacggtatcagtattcttttcagggctatacccttgttgatggcccttttctgtttcggctacggagcctttgtgctccacgaaggactggattcggcaaaatttgtggccggtccggtagtattttccttagggatgatttgcattgccttgttcgccacagcggcaacaatcattagacaaattattcatacctacaatccgatagccagatacgcacttccggttattggttacctggcagccgtactcacagtaatctatggttggaattatatgcacgaagctgccacggcaagcaatttcgtggcaggacacgtgatttgcggagtcggtttcatcacagcttgtgtagctaccacagccacagcctccacccgcttcaccctcattcccgccaactcggaacgtaccgaccagctacaacctgccgatgcattcaattcctcccagggatatatcctgatagcagttgccacccttatggcagtaatggcatggatatgggccttctggctattgtcaaaaagcagcgagcacaatgcatattatgtagcaggccatgtcatggcaggacttgcttgtatctgttccagcttggtggcgctggttgcaaccatcgtccgccagatacgcaacaactatacaaagtctgaacggaaacaatggccggcccttgttttgataatgggcagcataagcattctctggggacttctggtcttggccaacagcaatccggcactctcctccacaggatatattatgataggcctgggactggtatgctacagcatttccagcaaagtcatactacttgccgccatctggcggaacactttcaagctggccaaccgcatcccgctgattccggtcttcacggccctggcttgtctgtttctctccgcctttctgtttgagatggcaagcctgcacaatgcctattttgtccctgcacgcgtactggcaggtttgggaggcatctgctttacattattctccatcgtaagcattctggagagcggtacatctaagtagacattttcccgccattggcctgagcatcgaggaacaattccacacgctcggcatggtgggccacataagctgccggaccggtatccccggaatcaagaatatcgcggaccacatccgccttattcttgccggtaacaaagaaaataagattcttcgcagcaaacaaaaggcagccggtcatggctatgcgtttctgcccattatagggattgacactcacctcataaggatgaaaggaagaaagcagatattcctgccccggaaagatagaggaggtatgcccgtcgtctccagcaccgagcaaaacgacatcgaaggccgggaagccaccccaaagcggaaccgtgcggcaaaccagcgtcgaatagttctttgcttcaatctccgggcggttcactccataaataggataaacgtattcatcgggcatgcctacttcatccaacagcaaacggcgcatggtaccataattgctctcataatcctctgccggcacacaccgttcatccacccaataaatccgcatccgcatccaaggagtcacctccttgtactcgttggcccaaatgtcaaacatcagcgaaggagtacttcccccactgaatgcaaaataaaaggtcttttccggctcacgctccatcatcgcaatcaaatgttcaatcaacgcatgtgccgtagctgtagccgaatggtaaacataacttttcataactcgcaatattcatctgtattagtcaaattcttacacggattagtccactcagcaccatgttcgtgcatcatcgcttcactttccaaaggtccccacgtacctacgggatacccatataaaggagcatccgtatgctctttccaataacgcaacacgggatcgaaaaagcgccatgaagcctctaccgcgtcgctgcgggtaaagagtgtagggtcaccttgtatgcagtcctctatcagacgggcataggcatcgccggtaggcaacccgcccaactggtcataactgaagtccatcatcacctgcttcacgtcaaatccgggtccgggagtcttcatgccgaatttcagcacaataccttcattgggttgcaggcggagaatcagcttattcgcgcggggacaatgtccaccctcgcaacggaacatctgatggggcgtctcacggaaatgtacaacaatctcagtcacctttgtcggcatttgtttgccggtacggatatagaaaggaacacccttccaccgccagttgttaataccgattttcatggcaatatacgtttcggtacgcgaatcaggtgccacgttcttctcttccctatacccggctttcgagcccgaagccgtatattgtccgcggacaatgtgttcctccaaatcctcctctgtcaagggggccaatgactcatagaccttcaccacctcgttgcggaaattatcggcattgaaaacggcaggcggttccaatgcagtgagcgccacaagctgtatgaggtggttttgtaccatatcgcgcagggctccggcaccttcatagaatccgccacgtccttcgatacccagattctctacggctgtaatctccacatagtctatataattacggttccatagcggttcgaagattccgttggcaaaacggaaggcgagaatgttctgcgccgtttccttacccaaaaaatggtcgatgcggtaaatctgatgctccttgaaaacggaagcataaatgctattcagctttctggctgactccaaatcgtaaccgaacggcttttcaacgatgatacgcgtatcaggacggttcagaccggccgccttcaagtgcaagggaatgacaccgtacaaggaaggtggagtagccagatagaacagcaggttgtccggtttctgctcaccggtaaactcttgtaaacgtccgtccagcagatgatagccttcaacctcggcgggatccaatgtctggtaatgcagatggctgcaaaaatccctcattttatcttccacctgctctttggaagctacgaacttactcaattcactcattatatattcttggtaacgggcatccgtatactcggtgcgtcctatccccagaatggagaatccttccggcaaccgcccgccactatataaagtatagagcgccggcatcagtttgcgcttcgtcaagtcacccgaagcgccgaatataacaatcactaatttattcatcatcttctccccctttctcacacattgtacgtacccgatttcgtatctcctccgtgtcccgtccaattttcatggaaaaactgtccacgcaactcgtctgtcctttcaaaggtatgcgcaccaaaatagtcacgttgcgcctgaatcatattggcaggcaacttggcagacaccagcgaatagaaataattcaaggcggacgagaatgcaggcaccggaagttcctctttcatggattgtgccaccagatgtttccagccggaaagcaacagctgcatttcatttttgaaataaggagccaacagcagatgtttgggcttgtcttttgcctcgaaagccgtagctatgtcgttcaggaaaatactacggatgatgcagccgccccgccacatgcgtgcgatggatgccaaatcgaggttccaggcaaaagcgtcggatgcacgctgcaacacggcgaatccctgagcatatgacactaatttggaagcatagagtgcggaatagatatccttcaccatctccgacttgttgtacaccgcctgcgagcgtcggcatacaaattgcttggaagccgtttcacgcaagcccttctgtgccgacaaactacgttcgaacacagccgtagcaatcagccccaacggcatgcccagctccatcgcattgataacggaccacttgcccgtacctttctgtccggcggtatccaatatcttatctatcaggtaacctcctgatttgtccttatgacgcagtatgttggcggtaatttcaatgagatagctacgcaacttaccctcattccaatcagcaaagatttctgccatctgtccattgtccagaccaagcagattcttcatcacccaataagcttcggcaataagctgcatatctccatattcgataccgttatgtatcatcttgacgaaatgaccggaaccggcaggaccaatccactggcagcacggagtaccgtcagatgcttttgccgcaatactctgcaggataggcttcacctcaggccaggcactttcagatcctccgggcatgatagacgcgccgttcagcgctccttcctctccaccggaaactccagctcccacaaaacggaagcctttcttttcggccaatgccacacgccggttggtgtcctcataattggaattaccaccgtcaatcaggatatccccttcggacaaatggggaaacagctgttccatcagttcatccaccgcactgccggcacgaaccatcatcattattttgcggggtatggcaatggaagttacaaattcggctatatctgtatagccttcaatttttttccctttggcgcggccgttcacaaaacgttccaccaccccttcttccactcccggaaccgtacgattatataccgaaacattccatcccttatctgccatattgagggccaaattctcgcccataactgccagaccgataagtccaatgtctgttttatttaaattcttcatattcatgtaaattttgtctttatatggaaacaaaatgctaacagcatttgttcgtatgaattacgaaaataaaatagtacttttgtcagcgaaagcctatttttcaaccagacagaaaaccaatgctcatgaagaacttccacatcggactattgccacgcatcatcattgccattatcttaggtatacttttcggaaatttcctaccggcttcgctggtacggctgttcgtaacattcaatgccattttcagtgaattcctgaacttctccatccccctcatcattgtgggactggtcacgattgccattgccgacatcggcaaaggagccggacggatgctggtcgtcacggcgctcattgcttacggagctaccttattctccggctttctctcctatttcaccggtatggcggtatttccttccctcatagaaaccggggtgccgttagaagaagtcagtgagtctcaaggcattcttccctatttttccgtgggtatcccgcccttgatgaatgttatgaccgcactcgtacttgccttcacactggggctgggcctggctcatctgaaaagtgaggtactgaaaaatgcggcacgcgattttcaagagattgtcatccgcatgatcagtgcagtgatattgccgctgcttcccatctatattttcggcattttcctcaacatgacgcacagtggacaagtattcggcatcctgatggtctttattaagattatcggtgtaatcttcctgcttcacatctttctcctggtattccaatacagcattgcggcactgtttgtccgcaagaaccctctcaaactactgggacgaatgatgcctgcctacttcacggctctaggcactcaatccagtgccgccactatccctgtaacattggagcaaagtcggaagaacggcgtctctgccgatattgccggattcgtcatcccactttgcgccaccatccatctgtcgggcagcacattgaagattgtggcatgcgccctggcactgatgataatgcaaggcatgccccatgatttccctctatttgcaggatttatcttcatgctgggcatcactatggtagccgctcccggggtaccgggaggcgccatcatggcatcactgggcatcctgcaatccatgctgggcttcgacgagtcggcacaagcgctgatgattgcactatacatagcgatggacagcttcggtactgcctgcaatgtgacgggcgacggggcaatcgcactgattatcgacaaagtgatgggaaagaaatagtttatattttgctatctcgtggaaaataacgaatattgcagtccgaaaagacataataacaagaagcatacattatgaagaaagcccttatctccggcattaccgggcaggacggctcgttccttgccgaattcctcctgcagaaaggatatgaagtgcacggtatcctgcgtcgctcttcctctttcaacaccggccgcatcgaacacctctacttcgatgagtgggtacgcgacatgaaacagaaacgtaccattaacctgcactatggagacatgacagactccagctctctcatccgtatcatccagagtgtgcagccggacgaaatatataaccttgccgcccaaagccatgtcaaagtatccttcgacgtgcccgaatataccgccgaaaccgatgccgtaggcaccctgcgcatgctcgaagccgtacgcattctcggtatggaaaagaagacacgcatctaccaggcctccacttccgagctcttcggaaaagtgcaggaagtgccgcaaagcgaaacgaccccgttctatccccgcagcccctatggcgtagccaaacagtatggcttttggattacaaagaactaccgcgaaagctatggcatgtttgctgtaaacggcatactcttcaaccacgagagcgaacgccgaggtgaaaccttcgtgacaagaaaaatcacactggcggctgcccgcatcgcccaaggcttccaggacaagctgtatctgggcaatctggatgcccggcgcgactggggatatgccaaagactacatcgagtgcatgtggctcatcctgcagcacgacacccccgaagacttcgtcattgccaccggagaaatgcataccgtacgcgaatttgcgacactggcattccgggaggtaggcatcactctgtgctgggaaggccagggagtggatgagaagggtatcgacacacagaccggaaaagtcctcgtggaagtcgaccccaaatatttccggcctgccgaagtggaacaattgctgggcgaccccaccaaagcaaaaacactgctgggatggaatccgaggcagaccagttttgaagagttggtacgcatcatggcagagcacgacatgaaatttgtgaagaaactgtatttaagaagcaaagagctttgaatgaactattaaactttcagacaacaatgttagacaaaaatgccaaaatatatgtagcaggccaccggggactggtaggttctgccatctggaaaaatcttgaggagaaaggatacaccaatctcatcggcaagacccacacagaactcgatctgctcgacggagttgccgtacgccgcttcttcgacgaggaacagcccgaatatgtattccttgccgccgcctttgtgggtggcatcatggccaacagtatctaccgtgccgacttcatctacaagaacttgcagatacagcagaacgtcatcggcgaaagcttccgccacggagtgaaaaaacttctctttctgggcagcacctgcatctatccccgtgatgccgaacagccgatgaaagaagacgcactcctcacttctccgctggaatacacgaacgaaccctatgccatcgccaaaatagccggactgaaaatgtgcgaaagcttcaatcttcaatacagtacgaactacattgccgtgatgcccaccaacctttacggtcccaacgacaacttcgacctggaacgcagccacgtgctccctgccatgatacgcaagatacacctcgcccactgcctgaaacaaggcgactgggatgccgtacgccacgacatgaacctgcgtccggtggaaggcatcaacggcgacagcagcaaagaggacattctgaatatcctccggaaatacggcatcagcgaagaagaagtgagattatggggtaccggcacccccttgcgcgaattcctctggagcgaggagatggcagatgccagcgtcttcgtcatggaacacgtcgacttcaaagataccttcaagccgggcgacaaggaaatccgcaactgtcacatcaatatcggtacgggcaaggaaatcactatccgccagttggcagagctgattgtcaacaccgtaggctatcagggccggttgaccttcgacacttccaaacccgacggcaccatgcgcaaactgaccgatcccggtaagttacatgcattgggatggcatcataagattgatatcgaggaaggtgtgcaacgcatgtaccgatggtacttgggaaagtaattagtgacgtctgattagccatgaatgccatacggtacaaggtgggaactgtattgtttatattgctgatacttttatcaggtatcagcccaaccatgaatgccatgatagctcccgtgacctattccgttcgcggcaaagtcatcgacagacagtccagacaacccgtggcctacgccaacgttttcgttgccggcatccccgggaaaggggtatccaccgattcactcggcacattcaagatagagcaggtacctccgggcatttatagccttgaggcatcctgcataggataccagactgtttccacccccgaatatatcgtttcagcctcaaccccgttcatcgagatagagatggaagaggatgccaatctgctgaacacagtagtggtggtgccttcccccttccggcgaaatatcgaaagcccggtcagcatgcgtatcatcggcttgcaggaaatagagaaaagtcccggagccaaccgggatgtttcgcgcatcgtacgctcctatcccggcgtctctttctctcccatcggctatcgcaacgacttgattgttcggggcggttctccttccgaaaaccgcttttatatggatggcatcgaaatccccaacatcaaccactttgccactcagggtgcatccggaggaccggtaagtattgtcaatgccgacctgatacgcgagattacattttatacgggcgccttccccgccaaccgctccggagccttgagttccgtcctcgacttccgcctcaaggacggaaatccggacaagcaggcgttcaaagccaccatcggcgcatcggaagtctcgctcagcggagcaggccatctggggcagcgcaccacttatctgttctccgcacgccagtcctacctgcaacttttgttcaaggctttgggactgcccttcctgcccaatttcattgacggacaattcaaaacaaaaacccgtttcaacgagcacagcgagctgaccctgcttggtcttgcaggcattgacaagatgaaactgaataccgatgaaaaaggagaagatgccgaatatctgctcagctatctccccactatccatcaggaaacattcactttcggagcctcttacagacactacaatggaaggcacgtacaatcccttatactgagccataactacctgaacaaccgcaatctgaaataccgcaacaacgatgactcttccgaagacaacctgaccctgcgcctacgctccacagaacaaaagaccaccctgcgtttcgaaaaccaaacgcgcttgggagcatggaccctaaaagaaggagcagaactgaacaactccatctatacaaaccacagcaggcaaagactatacggcagtcattcgggtacgctttccatctacgaaacctcactcaacatcttcggctggggggctttcttctcttccaactataccaccgccgacaagcgtctggccctttctgccggtatccgtatggatggcaacacttacaaccgaaagatgcggcagctatggaaacagttctccccacgcctctctgcatcctacaaactctcggaacaatggaccctgagcggaagtaccggcctctaccaccaattgcctccctacaccgctttgggatataaagacaatgaagggcaatatctcaacaaaaacctgaagtacatgcaggtctttgaaagcagcctcggtgtggactggcacctgcaagaccggttcatggtttctgcagaaggtttcttcaagcgttacagccgtatgccactttcccttcaagacaacattccgttggcatgcaaaggaaacgattacggtgtcaccggcaacgaagcactcgtccctacagccagcggcagggcctacggactggaaaccatgttccgctggcaggcatccggcaagttcaatctcgtatcctccttcaccttataccgcagcgaataccgcaaccgcccagatggagacttcattccatctgcctgggacaaccgtttcatactcaacatgagcggtacatacaacctgccccggcgctggagcataggaggcaagctaagctatataggcggcagcccctacactccctatgatgaagacaaatcatcactcgtagaagcatgggatgccaaaggacagccctactacgactatgcgtactataataccgggcgacttcccaactttgcccagttagacttgcgtgtggacaagtccttctacttccatcactgcatgataggaatctatctggacatacagaatatcaccggcaacaaactgaagcaaccggatgtgataatgagtacgggcatcatcgaaaatccgtctgctcctgttaccgaacagcgctataaaatgaaatacctcaagcaggaaagcggcactatcctgcctactttaggtataactgtcgagttttagcaaatagccgccataaaaactattttccctataaaagtttgctttctatatataaacccttatatttgcacaattttcaaccaaatgtgcaattaatatcatggaacaaagttttatcgcctatatagagaatagcataaaggaaaattgggatttagacgctctgaccgactataagggagcaaccctacaatataaggacgtagcccgcaaaatagaaaagctgcatatcattttcgaggcaagcggcatcaagaaaggcgataagattgccgtctgtggccgcaacagttcccactggggcgtaacgttcctcgcaacattgacctacggtgcggtaatcgtccccatccttcacgagttcaaggcagacaatgtacacaacatcgtgaaccattccgaagccaaactgcttttcgtaggcgaccaggtttgggaaaacctcaacgaaagtgccatgccgctgctggagggcatcatgatgatggcagacttctacattcttgtctcccgtagcgaaaagttggactatgcccgcgaacatctcaacgaaatgttcggtaagaaataccccaagaacttccgcaaggagcatgtcagttatcacaaggaccagcccgacgaactggcggtcatcaactatacatccggcaccaccagttactccaaaggagtgatgctgccctaccgcagcctttggtcaaacaccacttttgctttcgaagtattgccgctgaaagccggtgacaagattgtctccatgctgccaatggcacatatgtacggacttgcattcgagtttctgtatgaattcgccgtaggttgccacatattcttcctcactcgtatgcccagccccaaaatcattttccaggctttcaccgaagtgaagcctaacctgattgtggctgttccgctcattatcgaaaagattataaagaagagcgtactgcccaagctggaaactcctgccatgaagctgttgctgaaagtacccatcatcaatgacaagataaaggcgaccgtacgcgaacaaatgattcaagcctttggcggaaactttgcagaaatcattgtaggaggagctgccttcaaccaggaagtggagcagttcttaaagatgatagatttcccctatacggtaggctatggaatgacggaatgcggccccatcatctgttacgaggattggacccgcttcaaacccggttcttgcggaaaggccgcaccgcgtatggaggtgaaaatcctatcatccgatcccgaaaacattccgggagagattgtctgccgtggtcccaatgtcatgctgggttactacaagaacgacgaggccaccgtacaggtactcgacaaagacggctggctgcacaccggagaccttgccctgatggatgccgaaggcaacgtaagcatcaagggacgcagcaagaacatgctccttggtccgagcggtcagaatatctacccggaagagatagaagacaaactgaacaatatgccgtatgtagccgaaagcatcatcgtgcagcagaatgagaaactggtaggtctggtttaccccgacttcgatgatgcctttgcccatgggctgaacaatgacgacatcgaacgcgtcatggaggaaaaccgtgtggcactgaatgcagaactgcccgcatacagccagatattcaaaatgaaaatctatcctgaagaatttgaaaaaacgccgaagaaatctatcaaacgcttcttgtatcaggaggccaaaggataatgtaaaaaaacaattaaactacaacctatctaaccctttctaaattattatctaaatgagaaacgaattattattatccgccatgcttccgatatgcggaatggcgggagaagcgtatggcatgccgcctggggatgccgtacctgctccaaaagagcagccaaacatcattctgttcctagtggatgacatgggatggcaagacacgtccctccccttttggacacagcgtaccaagtacaacgatacgtaccatactcccaacatggaacggatggctacacaaggcaaaatgtttacgcaggcctatgcatgcagcatcagttcacctacgcgtgtcagcctttttacgggaatgaatgctgccaggcatcgagtcaccagttggaccctccgcaagaacactacccatgaacaacccgactcggtcatgatttatccggaatggaacgttaacggcatttgtcaagagcctggcgtggaacggaccacacaagtcacctccctggccgaagtgctcaaagaccatggctatcacaccattcattgcggaaaagcccacttcggtgctgaaggcactcccggagccgacccgttgaaaatggggtttgaagtgaacatagccggacatgctgccggttcacctgccagctactatggcaaggagaatttcggcaacaaaacagacggtaaaagcccgctggctgccgtacccggtctggagaaatatcatggaaccgacactttcctaagtgaagcccttaccatagaggccatgaaggccctggacgatgcacagcagactgacaagccattctttctgtacatggcacactatgccatccatacccctatacaacctgacatgcgtttctaccagaagtacctggacaaaggccttcctccggtagaagctgcctatgctactctcattgagggtatggacaaaagtctgggagacattatggattatctggacaagaacaacctgacggaaaacactatcctcatcttcatgtccgacaatggcggtttggcggcccatacccgcgccggacaactgcatgtccagaactatccgctcaacagtggtaaaggttccgcctacgaaggaggcatacgtgaaccgatgattgtccgctggccgggcatcgtagcgccccaaacccaatgcgaccattacctgatgatagaggacttcttccccaccatccttgagatggcaggcgtagacaactatacaaccgtacagcaacgcgacggcatcagtttcatgccattgctcaccggaaaaggtaaaatgaaagaccgtgatatctactggcattatcccaatagctggggtccttccggcccgggcatcggagccacttgctccatccgttcgggcgagtggaagctggtgtattatttcggtgacggtagacgggaacttttcaacatccccgccgacatcagtgaaaaacatgatatggcccgagagaagcctgaagttgtcaaagagttgtcacggaaattaagtaattacctccggtctgtggatgcgcagcgccctctgttgcgtgccacccgccaaccagctccctggccggacgaaatatagaaaaaagtatgaaacgaaacctttccctcctccttgtgtccctgctttttgcagggacagctcttgcccaagaacataatccgggcagcgtacagccggatacgattcagaaatcctccgagaaatctttccggaaacaacgctctccacgaacagaccatggcccggtaggtatcaatatctccttatggaaaaacatctccacacagcggactgataccataggaagcacctgcttcaatctgggtgtgttctcctccatgaaccgtctgaatggcctcggcatgaatattcttggcagtgtaaccggcagggatgtgaacggtgtacagatggcaggtctgtcaaatatggtggggggaagcatgcgaggcatgcagatagcaggaattaccaacatcaatggcaacaaccttatcggagtatccgtttcgggactggtaggtatcaccggaaaccatgcgcaaggcgtcatcatttccggtctggcaaacatcagtggggactataatcgtggcgcctccataggcggcctgttgaatatcagcggagaaggtgcttccggcatacactttgccggactcgccaatatttccggtggaaatttcaaaggattttcaggggccggcctgctaagtgtaatcggtgaagacttgaatggcatgcagatgtccgcccttaccaacatcaccgccggagatatgaccggtgttcaggtttccggcctgggcaatgtggtgggtggtacagcccgaggattacaaataggcgctgccaatatggccatacgtgccaaagggcttcaaataggtctattcaactactacaaagaaaaattagatggtttccaattgggattagtcaatgccaatccccaaacaaaagttcaactgatgtttttcggtggtaatgccaccaagctgaatgtaggtgcccgtttcaagaaccggctcttctataccatcctcggtggcggtacccattatctggattttggcgataagttttccgctgccctcttctaccgtgccggtcttgaattaccgctctacaaacagctgttcatcagcggagatctgggataccaacatatagaaaccttcaagaacaaggactacggcattccggcacgtctctatgccctccaggcacgtgtcaatctggaataccacctgaccgaccgctttggcatattcctcaccggcggttatggcggcagccgctactacacccaagggaaaacctatgacaaaggcatcattgtagagggcggggtgacgatactgaaattataaattattgtttctccttaatcagccccgtcctatacgccaccagcagtttcatcaaatcctgaatctgcgtaacgagttcacttcctttatccgtatccttcaccatcatacgctgcgaattgaattcgacaaccagggttgtagacttgatgtcttgtccttcttcaatggctttctgacggctctggaacggctcatgctgcaccaactgcaagccgtgggaatgatataccagcgtatatcccgcaattcccgtttccggctgataggcttttgaaaaaccaccgtcaatcaccagcagcttaccatccgctttgatgggtttctcacctttaatggtctttaccggtacatgtccgttgatgatatgcgaatgtggccccggcttcacgccgaactcttcaagaatgcggtcacacacctcagcctcgttgcgcaaagcatagtaatgccctttcgtctccttatgcaatgttttgtcggccacaaaatagcgttcaaaggtagccatcttgtctttatcgaaggaaggggcatccggtccgcaccacatgtaccagacataatccagtgcaaactgtttctcgtccgaaccgtcctcgtcaaagtaagcggtacgtatcagctggtcggtctttttcagcaacttacgtccccagtattccttttggccgatgcggacatgtttaaaactgccgtccgcattcagaggcacggaagcatgataaagcaggttactgttgcacaccagatacatgccgccatacgtaaacaagcagcgcatgtgcttcttcatcttctcgctgttcatgaaagaagaatgaatccggtgcatcagttcgcgctcttcgtccgacagacgatacgggtccgccgggtctacggtggggaaattcacatcgcgcaacggatattccttgccttcgtatacaaacacaccacgctcgaaatccaccagatgcagcagtttccggttctccataccgaactcaggacggcggctgatgatttccgcttccagtttcaactggataaccgtaattgccttatgcatctgtgtaatcagccgcaaggtcttctcattgtattccgcatcggcaaagttcattttcggtgcaaagatggtgcaagggtcatccgcataggtatccatggcaaacgttgcaagcggcaacagattgatgccataaccatcctccagcgttgctaaattggcatagcgcatcgacatacggattacgttggctatacaagcatcattacccgatgcggcacccatccacagaatatcgtggttaccccattggatgtcgaaattatgataatcacagagagtatccatgataatatgcgcacccggtccgcggtcgtatatatcgcccacgatatgcagcgagtcgatggtcaagcgctggataaggttgcacatcgccacaataaaatcatccgcacgcttcgtagagataatggtactgattatgacattgatataggcatgtttgttaggttcgatgctcgattcgtgcaacagctcttgaatgatatacgagaactctgccggaagtgccttgcgtactttcgaacgggtatatttggacgaaacgttctggcatacttttaccaactggttcagtgttatcaaataccagtcatccaggtccgtttcctgctccttgataagttgcagcttctcttccggataataaattaacgtacagatttccttcttctcactttcgcgcagtgtatgcccgaatatttcgttcaccttacgtttcactgcccccgatgcattcttcagcacatgctgaaaagcctcatactcgccatgaatatccgtcagaaaatgctctgtacctttcggcagattcagaatggcctccagattgatgatttctgtactggcatcagcaatggtaggaaaactgcgtgataataattgcaaataacgcaagtcattgacaatactttccggagttatatttcccatagttatttaattgatagttgataattgacagttgataatatccctcattcttcattatccattaatgaagaacatgagcagcacttgggctatgattacccgtagaaacatgcacagcggataaaccgtagcataagctacagacggattgtctcccggaatggtgtcgttggcgtagttcagcgccatggggtttgccatgcttccgcacagcatacccgccattgttccgaaatctatcttcagccacttgaaggtaacgatacccataatcaataccggaaccacagtcaacgcaaaacccgtaacaatccataacagcccttccggccggaataccgtatcgaagaaatgggcacccgcatccagtcccaggcaagccaggtaaagagacaatcccaatgcacggagcatcaggttcgcactgcgcgtagtataagtcaccatgtgcatcctcggaccgaatgtcccgataagaatacctacgatgatagggcctcctgccaatccgagccgcacgggagcgctgatgccgggaatggaaataggaattgctcccaaagccagaccgatgacaatgccgataaataccgccaccaagttcggttccttcaggcttttcacagcattgcccagcaccttctccacattttgtatggcagcggcttcgcccactacggtcaggcggtcacccaattgcaaggtcagttccgctgtggccagcagctgcacgccgctacgataaacccggctgatattgataccgtaatgattacgcagatggagagaacccagcttcttgccgttcaactccgggcgcgtcaccacgatacgttgcgaaatcaactggctgtctatggcattccagtctatatcttccttgttccaatcagtatgctcctgctcgccgaaaagcacggtcagagccggcgtatttttctccgaggtaatcaccagcaggcggtcaccttcctttataatcttttccgaggtaggaatactcacattcccatcccgccacaagcgggaaatcacgaacttcggatagctgttcagcccgcctatttccttgatactcttgttgaagatggcaggattgtgcacctggaacgcaacaatgtaaggcttgttcacgtcatccttctctttcaattccaggtcttccttatgcgccagcgtcttacggatgaacagtacggccagaatgacccctaccacccccagcggatatgccaccgcacaccccaaagcaggggtactggactccaatcccatctgtttcaatgtctgctgtgccgcaccgagtgccggtgtgtttgtcgtggcaccgcaaagtatgcccaccatatccggcagggatactcccaacccatagctgcccagtacagtcagcagggtgccgataagcactacacccgtggcgagcatattcagttgtacccctcctttacggaaagagctgaaaaagcccggtcccacctgcaaacccaaagcatacacaaatatcaccagcccgaagctttccgcataattcagcatctgcgggtctatggacaacccgaaatgcccggcaatgatgccggcaaagaatacaaacgtcactcccaatgaaatgccgcaaacatgtatcttccccaatcccaatccgatagcggaaatcagtgagagtaccacaaccgcctgcaaggcggagtgctcgacgaataaactatatagccagtccaatgtgcattctattttacagtttcaggctgcaaagatagtgcaaacctcatgcaaaataaaacgaacccgtctattttttatgcggcagcacttctaaaaaagggatacgatacaataaatccctgctgccagcaaagcactgacggggatagtcagcacccaagcggtcatcagactcttcgtaactccccaacgcacagccgaaagccgcttcgtggcccctactccgataatagctcccgtaatggtgtgtgtcgtacttaccggaatcttcagatactccgtcagataaagcgtaaacgcaccggcagtttccgcaatcaccccttccagtggcgtcaccttcgtaatcttagtccccatggtcttcacaatcttccacccgccggacatggtaccgagtgaaatggccgtaaaacaagagaatgccacccagtccggcaggtcatcaatactgtttatccccattcccagtccttccgaatgtccggctatcatagccgcagcaatgatacccattaccttctgtgaatcattcagaccgtgcccgatgctgaacaaagccgaagacaccagctgcagtttcttgaaccacacctcggccgtatggggatgcgccctgcggcaaatgtacaagaccaacaacgtaaaaccgaatgccaccaccataccaatcaagggagccaaaaaaatgaatgccgcaatcttcagaatgatactcaactggatggcctcaaaaccgtgtgccatgatggcagctccggcaaaacctccgataagcgtgtgcgaagaagaggaagggattcccttccaccaagtgaacagattccaggcaatggccgcaatcacgccggccagaatgataggcaaagtaatgtaaggctccatcaccgttttcgatacggtgttggcaatgccgaaaccgccgatgacacacttggcgatgaaaaaggccacaaaattgaagaaagccgcccatatcaccgcctgaaacggtgtaagcactttggtagacacaatggtggcaatagaattggccgcatcatgaaaaccgttgatataatcgaatatcagagccagtacaatgataatcactaatagttccatgcgtccgttcgtttatgcgtatttcacaatcaggctcctcaaaatcttgcccacgtgttcggctgcgtccgtcgttttttccaactcatacataatctccttgattttgatgagttcaatgcagtccttctcttcttcaaaaagcctggtgatgaaaaattcataaatatcatctgcccggttttctatgtcatgcatctggttgcaatatgcgcgcagcttatccggactcttgcggaatgcctccagttcatccatggcctggccgatgagggccgcttcttgttgaaccatatgtcccagctctttccccttgtccgaaataggatgcggattatagatagtgatacgcttggcacagctgtttattccatcaatcacatcatccatgcccgaagccaggtcgtggatatcctcccggtcaaaaggagtaatgaaagtagtgcccagttcatccagaatcagattggtcagcttatcgccctcgcgctccaaatctttgattcgtttataatcttccgccctcttctcaggcaagtcatggcccaatatttctatcaacagagccgacgaggacaataaaatctcagacaattgcttcagtaaaggaaagaatttcggttctttcggtgtgaaccggctaaaaaaagaattcttcataatggataaatgtactaagtatattaatttatttttgttttcgttgtttcagtcttgcacgcagcacttctaccacggccggcagtatggaaaccacaataatggccacaatcagcagtttgaggttctcttgtacaaacggaaggtcaccgaagaaataacccgcataacagaagatgacaatccagcaggcgcccccaatcaggttgtacagcatgaagtaatagtaatgcatcttacccatccccgccacgaatggcgcaaacgtacggacgataggcacaaaacgagctatgataattgtcttgcctccatacttcttatagaactcatgggtcttgtcgagatggttttgcttgaatattctggaatcgggattattgaagagcctttgcccgaagaaatgccctatcatgtagttgcaagagtcgcccaataccgcggcaacaaacaatatcaaagccagcacattgacctcgagaggcatgtcgggcagtgcggcaatagctcccgccacaaaaagcagggaatcgcccggcaggaaaggtgtgaccaccagccccgtttcgcagaaaataatcagaaacaatatggcatacgcccacatatgatattcctgcactatatcaatcatatactgatcgatatggagaataaaatccaatagaaaatccattatatattgattatcagtacttaaaaaatagaaaaaaactcggcatggggagacgggcaatctctccggctcccgaaagagaggaagggaaagtactaaataagaatacgcctcagcgtatatacataatatctatatgaaatcttatggggatggaaagtaaaggggaaagaagttgtcttttcttccgggagcagagttttcagggttctcgcaaccttggcggcaatgaagtccggattaagcctcaacaatttcgaacaagaggcatgccgtaatgagaaggtatttcctatgcaaccggcatctgccaggcaattataattcgcgtcctcccctttttcctggcattgtctgccatctgcccccgacaagctgtgctgggctccggagaaataatgcacatccgcagtagggagtgtcttacatccctccatatcatcagaaacggaagtgaacttcgatatgaggaacaaccctaacaagatatagaatatacatttcgccatagcgggtgcaaatatagaaactattttcggattacaacagaaaaatgaaaaacaaaaagcggttaaccgtttcatcagtcaaccgctttcttgtttttgtagtgggtacgagaatcgaactcgtataccatgcgtgagaggcatgtatcctaaccgttagatgaacccaccctcgcatttgtcttgtacaccctcagggattcgaaccctggacccactgattaagagtcagttgctctaccaactgagctaagagtgcatctggcggaagctgggggattcgaacccccggtacggttacccgtacgtcagtttagcaaactggtggtttcagccactcacccaaacttccttttttataaccagcattcttttcaaatgcggtgcaaatgtagggcaaacttttggactgtgcaaatctttcctacatatttttttcaccgttttcatacaatttgagataacacgttaacactcaaaccctaaaacaagaaaaaaaatttgatacatatcaaaccgtccttttcaacctttccttatctttgcgcgatttttaaagtatagtgcacatacacggacaatgatacaacaagaaagcctaaaaaagcggcttgccaagctggccgcccccatttttatagagacacttctcatcatgatgctcggtgcggtggacaccatcatgctgagccgccactcggacaacagtgttgccgccgtaggggtagtcaaccaaattatcatgctcactttcctcgttttcgaagtcatcaacctcggaacgtccgttctgtgttcccagtatctcggtgcgaaactacacaagaaagtagtgcaagtagtcggcgtatccatcctcgtcaacctggcggtaggtatcacggtcagcctggtactgttctcctgcgcccatcccatcctccggctgatggggctcaccgctgaactgatgcaggacggcatggactatatgcgtatcgtaggcgctttcgccttcttccaggcactatccctcaccctctccgcctccctgcgcagtgccaacaaggccatctacccgatgatggtcaccgtcgtagtcaatatcctcaatatcatcggcaactactccctcatcttcggccgcttcggctttccggaactgggcgtggaaggcgccgccatctccacagccttcagccggggtgtctccatgattatactgttcgtcatactgttccgcaagcacatccaccgtttcccaccggcatacttccgcccttttccgtggatagaactaaagaacctgatgaaggtaggcctgccctctgccggcgaacaattgtcgtacagctcgtcgcaagtcgtcatcacctacttcatcaacatgctgggagtggaagcgctcgccacccgtacctattgtgtcaacatcatcatgttcgcttatctgttcagcatctccatggcacaaggcggcgccatctgtatcgggcatctgataggcgagaagaaacctcacgcagccttccttatgggaaaatacgtcatgaagaaatccgtcatgattaccgtcatgctgtcctgcatcctcgccctttcggggcatgccatctttggctggctcacgtccaaccccgacatcatacgtatgggtgccaccatccttatcatagatgtactcctcgaaataggccgccccatcaacatcttcgccaccaacgcccttcgtgcggcaggagatgtcaactaccccttctacgtagggttggtggtgcagtggagtgtagctgtaggtgtgggataccttttcggcttccccttcggctggggtatctgcggcatgtgggtagccttcctgttggacgagaatatccgcggcttcattttcgtccgccgctggtatggcatgaaatgggtaaacaaaagtttcatacggagctgattttttctcgtaaaaaccttatctttgcccctcgaacaaacaaattatggctttatggatgcactattgaaagaaaccgtagatgccgctatcaactcccgctatccaggcatggcccccgagggaagaaggttgatagaggaaatcctcattcgcaaggaagtagaaaagggcgcattattactcaatgaagggcagataagccataatatcgtatttgtaggaaaaggcatgttgcgccaattctattataaaaacggtaaagacgtcaccgaacacttttcctatgaaggctgcatcatcatctgcatagaaagtaccttgaagcaggaacccacccacctcatgattgaggcactcgaaccgagtgtcgtatacctgctgccatacaacaagctgctgacacttaccgaaatctcatgggaaataaacatgttctatcggaagattctggaatattccctgattgtttcacagataaaggctgactcctggcggtttgagactgcacgcgagcgctataaccagctcatggaacatcagcccgaagtcatcaagcgggctcctttgtcgcacattgcgtcctatctgctgatgacccccgaaacactgagtcgggtacgttcgggcatactgtaaccctcctcctgtctgcccggagaatacatatctgaatttatatagaaattttaccatttctcccctaagcgtgcattgattgccatacaatcatttcatgctcaaggttgttttatatgtatttaaaatattaaaattcagattatgaatactatacataatttttccgcttccctgatacagcggacaaaacaagccggacgatacagtacatccggtatatataccagtacagtgaacagctttttccgcttcatcggccaccgttccatcacttttgcagatctcacccccagcctcatcaagcaatacgaagaccggctgctcggcgaagggcggcgccataataccatatccacctatatgcgtatgctccgttccatctctcaccaagctgccgaacaaggcattccattcacacacagtatagacgatttgttcgcctatgtattcactggctatgagcctaccgccaaacgggccatctctcctttactaatccggcgcttggtaaatcttgatttggagaagaaacccgccttgcgtttcagccgcgacatgtttctgttaagtttttacttacgaggcattccgttcgtagaccttgtacatctccgcaaaacggatgtcaagcacaataccatttattattaccgccataagacccgtcagcaattgtccgtacatatagagtcgtatgccgcacagattataaataggtataaaaacgaagccgcctcttccccctatttgctactgatattatcactgaccggggaagatggttacagacaatacaaaagtgctttacggctctacaaccaacatttacacacactttcgaagatgttacggttaagcattccattaacatcttatgtagcccgccatagctgggccaccactgccaaagacgaaggagtggccatttctgtgattagtgaaagcttaggacatacttctgaaaaggtaactcatgtttacctcgcttcttttgacaacaatgcgatgagtaaagcaaataaaaaagtgattgcgacaattcatccaaacaaaaagaaaaagccctaaaagcaagaatttgtaaaagtattcctatttgtataggagtacttttattcgtcaattttattctcttacttacaaggtaagagaatatattttgtggctgcaaagatatgaaaaagattactacaatcgtaaaaaatagatttattttttaattcatatttatctcatatatagatataagacacattgcagccacttgtatttcagtcttatatatttacataaacacatctatttttaattcaaaaattaaatttaattatgagataaaatatcgttttacattttaattacatatatagtcttttaatgtaaaacaccttttaatggctgatttataagattatcttctaaataaaacacgacctcttaccttgtaagtaagagagtattggtatccattaccttgtaagtaagagaattattaaacaaacagaaatgaacaggtttttctctttccataccattgagagagcaaaaagctattgaattagtgtgaattatgaaacaagttctccatttcaataaagtgattaagttcgtcattatctttggcgacttatgcttactgaacatcattttcatctcgctatatcacatttttgactaccaaacactgggcaatgaatttacacattcattgccacagttattggtattattaaatctcgtctatctactttgcaattattctaacggagtcatactgcatgaacgcattgtacgaccagaacgaattgtacgtcgagctttccgcaacacgattttccacgcagccttatttataagtctggctactctagcggaaatcggcaccagttcactccgctttttcgcttgtttttatggtatattttttatctgtcttgctgtttatagacttatgtttcggtatcttctcaaaagatatagggaatatggaggtaattcacgtactgtcgttctggttggtagcaacaagaatatggccgaactttatcaagaaatggcaggagatcctactaccggtttccgcattagcggctatttctgcgatttaccctccaatgattttcctgaaagtatcccctatttaggtcaacctaaagaagtcgtcacttatttacagcaacatcatatagagcaagtctattgctgtctaccctctgcacgcagtcatgagatagttcctatcatcaactattgcgagaatcacttgattcgcttctacagtgtgcctaatatccgcaattacctgcatcgccgcatgcacttcgagctgttcggcaatattcccgtactaactatccgtgaggaacctttgacacaaatggaaaatcgtctgctgaaaagagccttcgacctctttttctccctctctttcctttgtaccgtatttccctttgtctatatcatcataggtacaaccatcaagctatcttcttccggccccatcttcttcaaacaaaaacgaagcggagaaaacggaaaagaattctggtgttacaaatttcgctcaatgcgtgtcaacatagatagtgacaaactacaagccacagccaatgacccgcgcaaaacaaaaatcggagatttcatccgtaaaaccagtattgacgaacttccccaattcatcaatgtattattgggacaaatgtccgttgtagggccacgcccccatatgctgaaacacactgaagaatattcacaccttatcgacaaatatatggtcagacatctggtaaagcccggcatcaccggttgggcccaagtcaccggctaccgtggtgaaaccaaagaactctggcagatggagggacgtgtacagcgtgatgtctggtacctggaacactggactttcctattggatttgtacatcatatacaagacagtcagaaatgccgtccggggcgagaaggaagcctattaaaataaaaaaatgagaattaaaataaaaaagacatagtgatgaaaaacaagaaaagcataactatcctaatggtggcatttacattggcaagttgccaatcctataaaagagtaccttatttgcaaagctacgaatcacttacagataagggttataaggaaattgtcattaatgaagtaaaccagcaggataccctctatgatgcacgcattcagccgaaagacctgttgagcatcacggtcaacactagcgacccgcaagcagcggcaccgttcaacctaaccatgcagacctctatcaatgtggctcaagccaatagtacctatgtcacatcacagcccaccctacagcaatacctggtcaataatgaaggtgagatagactttcccgtcataggtaaattaaagataggcggattgactaaaaccgcagcggaaaaactggttcgtgagcaacttcgcccttacctcaaagagactcccatcgtcaccgtacgcatgtccaactacaaaatatcagttatcggagaagtgaaccatcccggtacatttaccatcaacaacgagaaagtaaatctctttgaggcactcgccatggcaggagacatgacggtctacggtatacgcagtaacgtcaagcttatccgcgaagacaataacggacagcggaatatcataagcttgaatctaaatgagcaaaatatccttcattctccttattattatctgcaacaaaatgacattctttatgtcactccaaacaagaccaaagctaaaaatgccagtatcagcaacagcaccaccatctggttctccgtagtaggtacactcgtttcgctggcaagcttgattgtgacgatagcaagataattaaaagttaaaagttaaacgctaatcattaatccctacatatcgatgaaagaagatttatacgatgacctttttgatgagaaagaggaaaagacagattttcaagccctcttttttaaatatgtcatccactggccctggtttattgcaagtatactgatatgcatggctctcgccttcatttatctacgctatcaggctcctgtatacgaagtagcctcttctgtacttattaaagaagatgacaataagaagagcgctaacaatgctttagccgctatgcaggatttcggtatgttttccatgaccagcaattttgacaatgaagtggaaatcctaaaatcacgcacgctcatcaagaaagtcgtatcacacctgaatctttatataaacatagcacaaaaacagccattcggttacgatattccactttataaagatactccctttgacgtcttcatgactgccgaggaggcagataaactggatgaaaacattctattggacctgacttacgatacactcggcaaactgtctgccgaagtcagttacacacaagacaacgagaagcagaaagcacaaaagtcttttgacaaactccccgctattctgccgcttcccatcggtgtaatcaccatctcgggcagagactctttgtcaatcccgaccgaacccatcaagttaaaagtcaccatcagcaaacctactgccgtagccattggctacagttctgccctcaccatagagcctacttctaaaactagtactattgcagctgtcagcctaaagaatacgaatgtacagcgggccattgacttcatcaatgatttgatagcagtctataatatagacaccaacaccgaaaagaatgaagtagcacagaaaagcgctgacttcattgaagagcgtataggcattatcaacaacgagctgggtacgactgaaaatgagttggcggcattcaaacaacgtgccggtctgaccgacctcagcagcgatgcacagcttgccctgcaggaaagctccaaatacgaacagcaatatgccgaaaacgccactcaaatcaatttagtgacttatctacgcgactatatcaataaccccgacaataatgacgaagtcatccctgccaatgtaggcttgagcgatgtcaacctggcatctgccattgagaaatacaataatctcgtcgtagagcgtaagcgtctgctccgcacttcatcagaaagtaaccccgccattatcaatctaaatacgggtatcgaagccatgcgccacaatgtgaaaactacggtgaacagtgtactgaaaggactgcaaatcacacggaacaatatcgaccggcaatcgcgcaaatacgaaagccgcatcagcaatgcccccaagcaagagcaagaatttatgaccatttcccgccagcaggaaatcaaagccaccctttacatcatgttgttgcagaaacgtgaggaaaatgccattacactggccgccaccgccaataatggacggattatcgaagagcccatccctggcggtatcgtctctcctaaaggcaaactaatttacataattgctcttgtcatcggtataggcatccccataagcatcatctacctcctcaacctactccgttttcgtatcgaagggcacaccgacgtggaaaagcttacaaccgtccccattattggtgacatacctcttaccgatgctggtaaaaatggaacaccgactatcgccgtccgcgaaaacgacaataatatcatggcagaaactttccgtagcctgcgcaccaacctgctcttcatcatgggtgacccggacaagaaagtaatcctcgtcacctccaccataagcggtgaaggtaagacattcatggcttccaatcttgccgtcagcttggcactgctcggcaaaaaggtcattctggtaggattggatatacgcaaaccgggattgaacaagatattccatctttcacacaaagaaaagggaatcacgcaatatcttgctgctcctcaatctacggacttgcatgcgctgatacagccttccggcataacttccaaccttgacttgctattgggcggtcccatcccacccaatcctacggaactactggcacgccagtcactggaagacaccatcagtacattacgcaaagaatatgactatatcgtactggatacagcccctatcggcatggtgaccgacacgctcatcctttcgcgcgtagcggacgccagcatctacgtctgtcgtgcagattatacgcataagactgattaccagctcatcaacgagcttcaggagcatcatcgcctccccaacttatgcacagtagtcaacggaatcgatatgaagaagaaaaaatacggttattactacggctatggtaaatacggaaagtattacggctacggtaagaaatacggatacagttgagttagcgactagctattaagagttgagagtaaataatcgagtgtctaatttttaatttctaatttttaattaaccccgcccctccaatgtgacaggcgaccgcgtagcgcgcccgaacctcaactatttatgaaccatagaaatacacctttaaaggattttacatgaaccatactgatatcacccctcatattattcctcgtcgccaatggctggtggcatacgtgcagtcttgtctggaaaagaagactgccgaacggctgaaagctatgggagtggaatgctacctacccatacaaagcgaaatacgccaatggagcgaccggcgcaagaaagtggaccgcctggtcatcccgatgatgattttcgtgcatgtcactccgcaggaacgccccctgccgcttaccttacaagctatcagtcgatacatggtattgcgcggtgaaagccgtcccgccgtcattcccgaggaacagatggaacgtttccgctttatgctggattatagcccggaggctgtagagatttgcagtacacctctggcagcaggtgatgccgtgaaagtaataaaaggccctcttgccggattggagggagaactggtcatgatagggggaaaaagcaaagtggcagtccggctggatatgctgggctgcgcacatgtggacatgccgataggatacgtggagaaaattaatttttaattgtctcgtattcgcttttggcgtcaaaacaaggacaagccttatggatagaggaactgagttgccgatgccctgaaatacgggcattgggatagtcggtcttcagctgccggagcaagtcgagcaaagagcatttctgcgcataggtacgtgtatcggcagggacaccattctcgtcgagcccaccctcatagcagatgccgatactcttgtcgttccagccggtggcatgggctccaatctgatgaaccggacgacaaatatgcacctcgccgtcacgggtgatgtagaaatgataaccgatatcggcaaagccccgtgccagatgactgcggcgaagcgcctccaccgagaagtgacggtcacagcgcgtagcgctgcaatgaactaccaggagggttacctcccgatagttctgatagaaactgcctgctttcatccggctaacggttgatgcaggaagtcaagccaaacactccggccaatgtagtggccacggtaataatcactttaaggacaatgccccatacagattttgattttgttttctcactcataacaatttgcaattaaggaattaaatactatggttagctgcattttttagacagaagaacatatttattttctctcttttgtcttttcgtttcatcctaacggattttccccctggtctccgtccgaaccgcctcccgggttgctgcctccaccggcatcttcacccccgccagtggctccggtcaggtccacggtagtctttccggccttcagggctttcaccacggcacgggctgcacttcgggttgccaccagattgaattccgcctcctccagcagctctccaaaacgctggccgcaggtccagttcacattcagcctacggatatggatggcaggattgaactccttggcagaagccgcgccgatactgttgatgctgatgtagaaactccccaggtcgcccaactggattttttgtccggccagcaactgctcccgcatgcaatccacggacatggtgaggatggcaacgatatccgaacgcttgtacacgcagccatgactggctatatgctcggcaaagcggttgatgtccatcacttccgaatactgcgcacttgcgtacgcttttttggcaaccgtcttatcggtaggattgccacgcatcacgatactgtagttaatcataaattaaaaattataagttaaaaattaaaagatagggagacgatactaatcccaggggcttacgattactaatcttcgcgcgtcacgattactaatcttcacccttcatcgtctgacagaacaaagatacgacgtacctccgggcagaataagagatgcggtgaagtgatatgaagggatgtgggaaaatgtgagattaggtaagattataccgggttccggcaatgggtatacagaaaaaattccgtacatttacagtgtattaacctgttaaagtattgtttatgaagtacgttgaagactacgaaaatatccccggcaaagagtggcccgtccgtccctattacaaacgtgaactggcagaggcatacgcccccaccatttcaccggcatccgcactcaaccgcttgtccaaatggatgaagctgaatttggaactggacgaagccctgcggcataccggctacaaaggctcccagaaaatattcacctccctgcaggtggaacttatattcaggtatttaggaaaaccatgaaagaatcaatcccccacatagcgcgccatggcgcattggttgcggtagatttcatcccctttcagctcgaccacccgataaccacggcggccaccggaacggacagcctcatagccctcctgcttcatcaccagaccgaggcgcgtgggactcaagggttgccggatacctatgttgatatgtcccagtatctgggcattggtcaagaacatgcactcctcgcccggcatggggcggcgatagtacacctgaacgagctcacgctccaggcagggcacctcaaaataacggttatgaagattcacggcatcaatctcctcctgctcaaaccagtagtggaagccgctcttccagagggcatagccttgcgcatacactccggcatagtctatgggataatcgaaaggactgtctatggaatccacctcgaagggaagccaacggcggttgccactgaggtcgttgaggaaggtgacgttgttgctcgtgccgcagaagctggctatatgcggacggctctccttgaagtgcccgtaggcggcacgctcgttcacgtctgtcatgccggtgatggccttcaactggctgacctgggcagaggtcatctcctccagctcttcaaggcataccagtgcaaactcggtcagcgtaaaaaggtcgtccttgctgacgcgccggctgttgcttttcacataaaaataacgctgaagttcgacaggaagcagacgctgcatccaggtagtcttgtagatgccctgcttaccgatgaagaccagaatctcatgattcaccaccttggtatcgagcagcgaagcaatggtggccaccagccacttcttgaaatagatgccgaaaagcttctggtcgtccttcacatgtacgccggcagccagacgggcaatagggtcagtagtaccgtcccaagcaggcagcccctccagataggctacaaagggattgaaaagcggcgtgtactccgaatcgagcacggaacgtatgtccgcaatgcgggcaagcatccctgccttgttcatgcggctccacaacgtgtggacgtagcggtcggtcagctccgcatactcctctccgcagtcggccatcaggacttcgaacttgccgctcaccgtatttttgcggaacttcgcctgttcggaaaggaactgctcgatatctgccaccgtggcaaacttttcatcgtcctctcccctgcggacaagggagcggataccatgctccccggtattcgcgtagcaggagccgatgacagctgccacatccccgtcatagtcgggaaagtgctccgctgcccaagcggcggctgtcttccgggccactccgtactggttgagcagataacccatgcgcatcacatattcgttatgatgatgttcacaataactcactccctcctcttccagcaggcgttcggcagctttcaccaccttctccaaacgtttgttgcgctttgtcggcacagcttcggaagcgccatcctgcggttggggagcaatcggactatcttgcaaaacaaaagaagcggcactgggattgtaatatacatgagggtcggaagccagtccactgatacgggtagcattcttgcactgcccgtcgctttcgaagcccaccaggcaggaatagtagtcgttgacttgattgaaatacttggcgtattgccggaaggcttttcccttttccgctccgttcaggtcatcgatgcggcagatgatacggatgccatgaccgctgatggtggtgtaggccatcaatgtatacttgtcggcacaaatcaatgtcagtgtggcagccatccgctcgggagcgatatggtccaggtcgaccaaggtatagccggtccaggcacagatatgttcgcgggtcttcccaccttcaaagcagacggcaacagcgaagcagggacagccggacttctcgcggtcggcatccttacgcaggtcttgctgcaagtagtagcgatgtttctcggtgcggtctcgcagggcagcgtcgcatttaatgatgttgactatttcttcaagagaagtttctactgattctgtatccgaatagcctctgaaaaggctgatattgcggtgttccataatttactgatttttgtttatgtttaaaattacgacgcgaaggaacgcataagtgcccagatacacaagtccggtcgtttccactacatggaaatgatttcgcttgtttttattattgtttaacaattaaaagagtcaacatgacaaagaaagagccggtgacaccggcattcggagcttttctgagcaaatgccagaaagaacagctcgttaacggcagacatctgaccaacgagaccatcgcccaagcaacgatgatgagtaccagaacctacaaccttttaaaaaagggctgagcaacaacatcaaccagatacatgccataacgcatttctggaggtcgttcccgaaaacagaccaagaaagggagagttttgagaaagaggtagcagattgcctggagaaggatttgaggaattatagaatccacacgggagtcttgaaaccttaacctcactcgaggccttgacacttgtggcaccctttttccaatactccctattaggctaatatttatcacacacaaacgatacaggtctgtgcatattgataatttgtctcgcgcgcgtaacggatatttatgtttaaggggtgacacaggtgtcaactcgggaaaaaacaagaaaaagaattaggaaaagaataaaaaaagaatctaatacaagataaataaaaaactttatctacctttggacgttgaatatagaaaaaactacaatggcaaataattatatatctgatttaacaactcctgaagcgattcaaaggatttgggaaaaaggtattatcgtagacggatataatgcgagtttatatcgtcaggattttgccggagcatggatttcccgtgaagcttatggagataccgacaatattttgggatgggaaatagaccatgtatatcctgaagaactgggaggtggaaaccacatagagaatctacgtcccatgaattggagaaacaaccgcagcaaaggaacagactatccacattacaccgcagttgttacttccgaagagaacaagaacatatacagagatacagcttgtacggtaagcgacgctttacaaactactttacaaaaactatataatatatgatagcacgcattctaatccggcaattgtatgacacttacaactatgatattcaatttccggaaaatcagcgcgtaacaattattaccggtcctaacggatatggaaaaactacattcttaaaaataatcaataatctactaacctgtaatttttggtttttctatcttctgaaattcaaggaaattcaaatattcttccgaaatggaatgaatatatccatacaaaaaaagagaatcgaggcagaagacaacaatcgtgaagacagaacgcccgcttcactaaaagaaaaagtttttttccgtttaaacgccaatgaaagtgatgaagcttatatagaagaattttctctttcttattcagacatactccgtttaaggcgacagctcctccctaccctgtcatacagacagactgaagaatatgatatagaagaactgttaaacaaagaatacaatatagattcagatatttctatcttggaaaaaagtaaaaatatccggatgtttttgcaagagcggaaatgctcttttataaaagagcaacggattatcgcttctacacaacattccggttatgatggacgaagaagattattaaatcaatttgaaatcgacgatattgccgcacaactgataaaagagttcgcaaagcaacaaatggagttcgcatcagaaagccaaaaaatagacagcacattcatcaaacgcttagtagaaggaacatataataaatacaaagaggcagaatttcaagaaaagctatcaaaattaaaagcaaaaatcaacaattacaaagaatacggattgatgccccaaattgatattctggaagaatatcccgaacatttacaaaatgtgctctcactctacattgatgatatggagcaaaaaatgtcttcatttgataaattctataagcaactttccctttttgaccgttttgtctcaggcaaagtcctttcaaataagaaaatcaaattaaatgaagtcaaaggggtcagcgtaataaacgataaaggggaagaagttccactccgcaaattatccagcggagagcaaaatttgattatcttgtactacaaattggctttttcgactgatatgcgtaccgtattgctaattgatgaacccgaaaactcattacacatggcatgggtcagccaaatgcttgaagactatcagaaaatggcagaagaattaaaatgccaaattattatagccacccactcccctgctttcatcaacgaacattgggatatatcctgtgacctatacacaaacaacgaagagaacaaccatgcagaatttgcagagtgtaaataatcctataataacagccaaccagtatctgctggaatggaagacgccttcaaaagctcacaagacattaatcttggtggaaggaaaagacgaccgagagttctactataaattctttcaagattcgaatagcgaaattaaaacaagtggcggttgcggagcttttagaaaagtctataattgcctgcaaggaaagataaagaatattgccatcaaagacagtgattttgcccgtttatgccacatttttcccacagaggataatatcttttacgctgatgcacacgattatgaaatgatgtgcctgaaaaacgaaagcacccgtcaggagatatttgaaaatctggctataacatacaatgaagatttatggaaacaaatctttcaagaactaaatattctttcctattttaaatggtacaactactgtgagcatttaaaatataatttcaagacatttagcgttgaagggctttcttccgagcaattaaaagatttcgaatatatacatacacaaattcttccgaaatccaatccaaacagaattattacagctaatgacattgaatcatttcaaagagaccactccccttgttgtgaatatgaactgactaatggacatgatttcataaaacgtttctgccatcatctcaaagccggcaacttaacccataggcaagaaaacgaaaacagcattcgaaacagattgcacccatgtttccgtttagaagcattcgttcaaacgcaattatatcaagatatatcggattgggagaatgccaatggaagcaatatattgaaaaggcccaattagtataataaatggataccctttctattttctaacttgacgcactttgctaactgacgtacttttgtgcatattgataatttgtctcgctcgcgtaacatgtatttgtgtttaaggggtgacacaggtgtcaactcggagaaaaaaacggaaacaattaggaaaagcggaaggaaatttgtttctttgcaagaaagaaaaacagaatgactggcaacatagaaatccatatagaaaatattggtcctatacgcgactctcgaatagaactgaagccatttatggtattctccggtgaatcgggaacgggaaagagctacaccgcattgcttgtgcactacatatacagagtgttgtgcaacaatgacatgtctggcttttttgcagagaacaatgcctcgtacgacaagcataaagagcaattgcccgatgcaaaccaaggcgtactctatgaattcacgttgcaagaatttgaaacatggtgtaaccggtctgccatcaaatacgtgggaaagatgcttggatattatgctttagaaggaaaagtttccatcaaattcaacggattatcaacagaccgatacaaattcacctatgccaaagaagtgctggaaatggatggagagatgaagtattacgatactgtatcaataaataatgacttacccctccgccttccttataattctacggaatgggatggaattccttatatgtttcttttcaccgaatatataaaatcaatattcggaatcaaccaaagaagcaccttcttgttgccgccctcacgcgggggaatcgtctgtctgaacgacatcggcagaagcgccctgaccggaatgtacaaagaattcatgtgggacttatccagccttaagacagcatctccgggaaatgaggcaacgaatgattacggttctgttttgagtcggacactgatagacggaacaatcaacctccataacaatgacttgtactacgaacagcaaccttacggagaaatccccatcatggccggtgcagcttccatcaaggaactcgctccttttgccatcatgctccaaaaaggattagtaggcgactactccattatgtttgaggaaccggaaaccaacctccatccggaactccagataaaagtagcagacatattggcccaacttttgcataagggatgccgttttcaagtgaccactcacagtgattactttctccgccggataaatgaccttctccgcttggatttgttgaaggacaggctcgacaaggatgaatacgaaaccttctgccatgaacatcactataatccggaagtaactatttcatcggaacttgtaaaagcatactatttcaaacgcaacccggacaagacggtaagtataatagagcaggacacccaaagtggaataccttttgacacgttccgttcagtattggaaaaccaactgacagacagttcatacgtttacgacaaaatatgcgaactgaatggagcagctgattaaggaatataatgaaatataccccacctatgcttcaaatggggttgtagagctaaatcatacttttgacgaagcaagcaatagcggcaagcccaacacattccaacgtctgaccgtgaacggaatgaacggcattgtcatcccaaacgtaatcgtgaaagacaacacctccatttttaaaaaagcaggttcaaaagccattttgaaagatgactgcgatggaatattcttcacagaacacggtggacagaaatatatttatctatgcgagttgaagagttctttttccactcaacagatagccaaagccaaagaccaaattatcggttcatacctcaagctccattctttattgagtttgttgcagtcgtacaaccctgaagaatggattataaaaggaataatcgcctcttttgcaccggacacagaacaacaagctctcctctcaaggcaaaaagaggcagggaataaaatttgtaatttatgctacaacctccatagagacaaaaaatattgcatgccggaaagcaattgcaagaaattctattccccgatgaatgtaccggaactgacattgcattacgttcccgtaccagacaaaaaagcaaactttacagttgacttcaaagagctggtgtaagccccgacaacaccatgccttaatatttcacggaagaaaaatttaatctcaataattatctcatgattagtaacacctgtattcacaggcggttaactgtcatgaggcgttatgagagacttacggtcgaaacatactaaaaaagatatttttagtattcaaatacacgaattcaccactgatgacaagcagcgattttttagtacttatatcactatcctattagccattgtttctacggcaatagctgataatagcaagcatacaagcgcttgtttttgattcatttatttacaacgacaaaaaagatttcatgttagcatctcaaagaatcatttttaatacaagtatcatgtatgccaagacggttctcactttgggcattacactgtactcaacaagaattatattaaacgaattaggagagaatgattttggcatctataatgtagtagcaggagtcattgctatgctctctttccttacccatgccatgtctcaatctacacgacgatatatgtctaatgccattggaaaaaaagacatcgaactacttgctaccatattcaagtccagcataaaaattcatttgatttggggatgtgcgtttgtcttgcttcttgaggtattaggagtattcttgttcaacggttttttaaatattccacctcacagattatcaaccgcctatttcgtattccattgcatggtagccagtacattttgttctattacggtcattccctatgttgctgcaataaattcgcatgaagatatttttgttatctcaatcatatatacattagaatcttttgctaagttagggatagctttctacctgcaatatacccttcatgacaagcttatagtttatggacttttattggcaacaatatattgcatcgcaactttaatatacagatggtattgccatacacattacaaagaaatacatattaaaataaaaacgaacaaagacaccactaaggaactcgttaaattttccttttggactgtcataggcaatgccagcagaataatatccacacaaggctccactattctcttgaacctttttggtggaactgtagccaatgccgcctatggcatagccaaccaggttaacggacaaatgagctttttctcggcctcgctactgcaagccatagagccacaaataatgaaaagcgagggaaacaatgatactcatagaatgaaaaggctaagcctactaacctgcaaattatcattctttctaatctcatttttcagcatccctattttttgcaagatgccttacattctgaatttatggttaaaggatgtaccggaatacaccgtaatcttttgcagaattatcctattgacagctctgatgagccaaattacgatgggacttcaatctggaatatacgccaaagggcgtatcagaaattatcagttagtcatgagcataatacaactcctctcattaccactggctttcatcttactaaaagcaggatttcctgtagaaatcattctatattcactcctaatggccgaaaccgcaatgggcatatccagaattattcttgctaaacatctcattcacataaagatagcaatactgataaaagagatgttattgccttctctggctgcatgtatcgcaacttttatagctgtaaactattcctcttccctattcatgacagattccatatttacattcttaatgctatgtcttgaatcgtttttagtatacagctgcttattttggataattgtgctgaacaaaaacgagaagcagtcatttgttaaattattaaagaactattcatttctaaaaaacgaagtcgtgcataaacacaatttttgcacaaaaaaagaaaatacaaaaaacatctgaaatgagtctacaaatcagtatttacgataaaataaattattacctgctaataacaggtctgatatttggtgttattttttacgatttcataggaataagattcggattcacatacatagacgaattttttgtcgtcatattagctatgtacagcatattaagaagaagattttcaaaggattttttcattttcataggaatagccctattttatctgctatattctttcatgtatcctatcaatacccatcaagccatcttaacagattttcttatacaaataaaacctttcattgccttttattgcgcatataatttaggaatatacatatcaccccgatattacaaacgcaccagacagctttgcataatatctgccatagcaatgattcccgtcggtatactgggtgaaagctttatgatgtcaatagaacttcatccttctcgctttgccactatcataaccattctcggaacactgtactattattgctcccgtcaagataaacatgcccgtaatatagctgcaatcatttggagtatagggctttttagtttaaaagcaaagttttatggattctatgtagccgccttatttcttcttttcatttatcctaacaaaaagtttaaattatctccccgtataattatactgcttacagcatgtttgagtatggtcatatttattgcatgggaaaaaatatcatattactacattgcaggagcacaagcaagcagcatatatgcacgtccctatctatatatgaattccataacgattctaaatgattattttccatttggcagcggttttggcacttatgcaacccatgcttcgagccaattctattctccattatatttcaaatacaaaatgtacttaaactatgaaataggaaataaacgattcctttcggatactttctttccatcattagcccaattcggttatataggaataacgctattcacgctattttggtatcgcatattccaaaccggcaaaaaattaaggaatttcaaaatcatattacttatcattttcttctttgtttttgaatctacatcagatgcaacctttacacaaaacagaggaatatatatgctaattctgctggcaatgttcttaaacaaagaaagatatttaaaagcaattcagaagaagaagatataaaataactgcaaacaacaatgtctatcaaaacactaaaacaacaattacgttctgacttcagtatatacaacacccctacactctcaaagaaaacatcaaaagcactaatcaaagcgcttaggggggggtaaaatatatttactatgtgatatttattcctgaatacaaagttgtattttggatgagaatcgtctcgtatttcaggcaaaaaaaagcgttctttatcatctatttattagcgaaactaatgcactatcattattataataaatatggtatagcactccccatcggacaaaaaattggtactccattcatgataggtcacataccaggcatcattatcaatggcaatgcaactattggcaataatgttttaataatgcaaaatgtcactattggaagcacacgaggcaaaggtgcgccaagaataggcaacaacatactactgtgtgccggcgcaaaaatagtaggaaatgtcaacataggagacaatgtagtagtaggagcaaacgcagttgttgttcatgacataccaaacaattctattgtagcaggcataccggcaaaagtcatagggaatgaccccgaaagaattttgaaattctatttaccaaactataaataattatcaatcatgattccaaaaattatccaccaaacagcaaaaaacaaaaagctctcatgggaagagcgaatgctaagaaaacgtgctatgaaattgatgcccgactatgacttcaaactttatgacgaccaagagaatagagccattgttgcaaagcactttcctgagtacctttcaaaatacgacaacatcaacaaaggcgttgccaaagcggacgttattcgcctgatttacatgtatttatggggggggggtactattgcgataccgactacaaatggttagcctctccagacaaattcagcctgaatgagtgtatttgcattttaccaatttcaagaggacaaaaagataatatagagtgtttgggaaatgcggtattcggttctgaaccgaaaattgaattttggaaagactttatcgattacttgtttcaagatagcgaaatttcacaactacaagaaaatagaattgaaaaagtaaccggtccggaaggacttaccaagtttttcttggccaacagaaccaagtacccatacatcaccctcccgcaaagcaatatgtttcacccacgcctcaaaggagtatccgcattaacagacagttcaagcatcgggattcaccactgctggtcatcctggagaagcggtagtttcaaagacaaattaaaaatatacatcaaacgaaaaatcacagctattaattaaagcctatgacaactcgtaaagatatttatcatagaatagaatggattgaccaatgtaaagcctacgccatcttcgccatggtgtttgctcattgtggaggcaggatggtgaatgccgatgcgcaaactgaccactggattcatctatggcacatgccactgttctttatcgtcagtggtatggtgctgaacgaaaagaagtggatggggtggagcaactatggtcgcttcgtgaagagcaggctgaagaccctgattctccccttcttattttggggaacagtgtgcaatgtatggatttatctaattctcaattatttacacatggggggggggtaaatccgcagatttaggcctgatgcttgaaaaatattacaatttccacgtaacgaccatcagcgccacgggatggtttctaccggccatattcttgacagaactgctgtttgtagcaatggccaatgtaataggtgccggcaagcgcacgacaatcttctatcttgcattggtagcagcgggacttttcttcctcgacttcgaccgaaccccactgctgttctcgctcgacgtggtgcctttcactatagctttctttgcattcggctttctcttcaagcaacagctgactgcaaacaagcgtttatcccctatcacggtgattgcactggcggcagcagtggcggcttgctactggctaccggtggaagccaacatccgcgtgtgccattacagcccacggtatatagcatggttggtctgcctgctggtgagcttcgccttgatttacatcataaagaacagcgaagccctcataaaacactttccgggttataaatggataggtgaaacgggcaaaaacacgctggtcatctacctgttgcatggagagattctccgtgtattaccctttggaagcatcgcaataaacagcccacttgcaacaaccgcctgccaactgatggttacggcaggagtagtggcactttgcctactggctgcacacttcatcaaccgattcctaccgtggagtctcggaaaattctaagaataagaacacaaaaccgataaatgaatgcgaaatagaaaaacgtcttcttgaagcactgtagaaataatgcaggaaattaggaaaagcaaagtgaaattcgtttctttgcaagaagaatagtttcaaaataacaaaatggcgtttacagaacaagaaaaacgggcagcttggaacaaggcacgcgaagtggacgggtatgataagaatatgttcagaaaagacgcgtgcggcgcatggatagcttggagcaaatatggcgcaagagacaatgattacggatgggaaatagaccacatctacccagtggaacgtggtggagacaaccatccggaaaacttacgtgcccttcactatcgaaacaatacgagcaaggccgatgattatccatcgtatatggcagccgtacaagcagatagcaatagaaacgtggtttacgagcgcccgctgacagtaaacaaagccaaacaaaagaggctatccgacatttatcatatagactgataatacatcaaaatctcaatagagtatgcttcgttcgttacatatcatttcattattcggcatctatacttacaccatagactttgccgactctcaaggcaaaggtttgaaattcattacctccccaaacgggtatgggaagacaactcttttaaatctaattcatgctttttattcacaaaattggagtttatttttgcaaacccctttcaagagtatcacctatacgcttgacgaatgtgttatccgaatcacccgacttcaaaacaatgaagaggaagagaattctgatgaagaaccgggctatgacaaatacatggaagtaaccattctttcggcagacggacaatcccccatcgaaagtatcagatatgacttggagaaagaaacgaaagaacaagaaaggcacaagcaagcaagcaactctttattacaaatgtattcgaacatacagccgtgctacttcatccatgacaaccgcttgcataaaacaaacactcctctcttaataaccgaagcgaactccaaagagcaaacttcgattacagctgatgcagaagacttaacagtcaaattggctgaaacaagaaacgggatttcgcaaatgaccacggatttggaattcactgtctccataagccgtgaagagtatcaaagtgccacgaaagagctagctgagttcaatgccctattaatgaaatacgggctaatggaaaaaaaccttatcacggattaccgagaagacaacgccttgtacttaggtgccttgattaaggctcttcgcgcagcccaaaaaaaatatggttcttttgtccaaaagttagcactgtttgagagaattatcatccgaagcgaattagcatataaacagatggaaatccatccacgctatggttatcggttcattgccgaaaacaaggagcgaaccattttacgctcagataccttgtcctcgggcgaacagcatctgataatcatgacctatgaactattgtttaaagctccggaagagtcgctgatactgcttgatgaacctgaactttcgtttcatttcctttggcaatccaattttctgaataacctgcaagacattcgcgaactgcgccctcgactgcaatggataatctgtacccactctccacagatattcggaagaaaatgggatttgtctgtagacctctatgaactgcaacagcacaaagattcagtagaatgaacactttacaaaattctatatccgataccggcaccgcctataccgttgacaccatattgatgcaacagaggacaccagcggcagccacacatacatggatagtggcagaagatatagatgacgtgcgagtgtatgaaaaacatacggacagaaacaaagtcagcgtacttccgtcaaccgattatccggctggtgacaaaggatgcgaacacgtggagaacattgtaagcctcgtcttgacttcatatcccaacgctcatgtattgggtattcgagattgtgactacacacgatacgaaataccggaacacatccatcctgcgaatatccttgcgacagacgaacgtgatgtggaaatgatgttattcaatgcaccttccgtccggaattctctgatggattggtcagaaaagttactcccgaatctgaatttggctatttcccatacccggtttatgggttatcttaggatatgcaaccatgtctgcaaattgggatgtaaattcaagaaaaaagtaaaactatccgggacatgggatgacaatacgcatcgtttttctgaagactggcaagagactctgctgcaaagattcatgagtaattgtggcaacgaggaaccgatgctatacatcacaagcaaagaagacctcaatgattttatcaatggctgggaactagaaaaagaaccttggggaaatatttgccaagggcacgacaccgtctggactctttctgtcctgatgaaaaaaaacagcatcttcagcgaaacaagcatcatgaaacgcatgaccgaaagttattccacagaggattttaaaagaacccaactctattccaatatagaatcatgggctgtattgaaaggagtcggcatcctaaaatagtcatttgatttctgcaagttgtttaacgcagaaaatcagattgttttgcaaaattttcaaatcaatatcacatatgaatgtagcaattgttggcaccggttacgtcggcctggtgtccggtacctgtttcgcggaaatgggagcgcacgtcacttgcgtggacgtggataaaacaaaaatagaatcattgcagaacggtcaaatacctatttatgagccggggctggacgaaatggtagcccgcaaccatcacgaagggagactgaacttctgcaccgacctgacttcctgcctggacgaggcagacatcgtgttcagtgccgtggggacaccgcccgacgaggacggaagtgcggatttaaagtatgtacttgccgtagctgaaaaatttggtcgtaacatccggaaatataccatcctcgtaaccaaatcgaccgttccggtaggtacggcaaaaaaggtgaaagccgttatcgaggaagagttgaaaaaacggggagagaatattccgtttgacgtagcaagtaacccggagttcttaaaagaaggctcggccatcaaagacttcatgtctcccgaccgcgtagtggtgggagtggaatcggagaaagccaaagatgtgttaagcaaactctaccgcccgtttctactgaacaatttcagggtgatttttactgatatacccagtgcggaaatgataaaatacgcagccaactccatgcttgccacccgcatcagctttatgaacgacatcgccaacttatgcgaacgagtaggcgccgatgtaaacatggtgcgcaaaggtatcggttcggacagtcgaataggcaacaagtttctctatcccggatgcggctacgggggcagctgttttccaaaagacgtgaaggccctgattaagactgcggagcaaaacgggtattctatgcaagtgctggaagctgtggagaaagtgaacggactacagaaagaaattctcttcaacaaactggacaaacactacaacggtgaactgaaaggtaagactgtagccatctggggattggcttttaaaccggaaactgatgacatgcgcgaagcgaccgcactaatcaccatacaacaactgattgaagcaggatgcaggataaaagtattcgaccctgtagcaatggacgagtgccggcggcgcataggcgagcgagtgacgtatgccaccgacatgtatgatgccgtattggatgcagatgccttattgctattgacggaatggaaacagttccgcctgcccagctggggcgtgatagccaaaagcatgaagactcctttggtaatagacgggcgaaatatctacgatgccgaggagatgagagtacacggatttgaatactattgcatcggtagataaatgatgaaaaaacaaatacacttggtaattgtacgctcaggcggcagcatcatcaatttcagctcttacaactgccaggaactgggtttggcaaaagcattgagtaaaaaaggctggaaagtaagcatcatactggccgggcacacttatcgtgaagaacgaatagaaataatggggggcaaagaggtaaccgtctactccatgaccttcaaggcactaaaccagcaactggcacaatttgaaggtatggaaagattgctggaaaagctgcatcccgacttgatacagattcatgaattcggcatgtggatgtcgttcaccgtaacgcgatgggcacaaaagcaccaagtaaagacctgcttgattcaaggcagctatcgccccacacaaaaaccgatattcaagcaacttgaactgctgttcaacgctacttttgggaaatatgtactgaaccgcgttcaaggcataggatataaatctccgcaagctgaaaagtatatccgccaatacaccggcaagaaatgcctacctacctatataggactggatgaagagcgtttttaccacacagaaagcaaagagtggagaaaaatgccggaaacagaaaacaagcacctattactttatgtcggtactttggagagcagacgaaatcctctttttctgctcgacgtgatggaacgcctgcccgacaactatcttctgatgattgcaggcgatggtatcctaaaagaaaaattaaaaaaagacatccaagacagaaatttggaacaaaaatgtgtcatactcggcaagctaagacaagaggaacttcctgcgctctacaaagcgtctgatttatttctgttggcttcggactacgaaatatacggcatggtgattcttgaagcgatgtactttggcacaccggtcatcagtactctaacagcaggtgctgaagtcctgattacatccggagaagacggaatgattatcccaaacaaaaaagccgacacatggagccacgtcattgcagaactctgtaacgacacaacaaagttgacagccatgagcagccgcgcttccaaaaaaataacggatgaactggtttgggacaaagcgtccgaaaggtttattgaactctataataatataacagaaatgaaaacaaaaggcttctacccccattgatatttgttaatgatacatatcccgatcactggctttcttggtgaatacgcgcaaagacagaagctgtcgaacttccatcaggcacaatgctgattggcgaatatgatagatacaaataatgagaacaaactaatatacaaaagcacaattatgaaacaaaaaaaaatactgctggtgacttatgacatttctccttataagggcagcgaagcatcggtcagctggaactatgtgttcagcatgcaacactatcacaagctgacagtgctctatggcaaaggaaaagaagacatagaacattacttgcaaaccaatagtatgaaaaatgtgacattctacaacctttcaccactgcctactacaggaaacaaactggcacaccatatcagctacaacctaaactacatgaaatggcagaaaaacgcataccatcaagttaagaaatggctaaaggacggaagaatagacattgtgcattacctgaatcctatcggattcaaagaaccaggcttcctatggaaacttcccataccctatatatggggacctttacaagcagtggaaaacctccctctttcccttttcccggcattaagctttaaggaaaaaatcaatgtgctatttaggagaattgtccataacggggcttttgttctgttacctcgcgtccgccaagccatgcaccgggcggattatctgtttgcagccacaccaaacactgtacggatgataaagaaattctacggtcggaaaagcttttatctccccgaaaacggcatcttacagatgaaccgcacgcagcccattgaacgccaaaaggaagagatattgcaaatagtctggattggcgccctctgcccgcgcaaggcactcatcatcctactggatacactgagccacacacgcagccgccaatggcatttggatgtcataggggagggtaatttatttaaacaactaaaagagaaatccgagcaactgggtattgactgtcacatcacatggcatggaagtatccctcgcacagaagtattgcaactgatgaaaacagcacatctgcatgtcatctcatcgctgggcgaaggcaatcccactgtactttgggaagctatgtcgtgggcagtgcctaccatgactctggaccactgcggcatggtaggcgtggtgtgcgagaaatgtggcattaaaattcccatacattcatacaaacaggtagtaacagatatggccgaacatatagaccatctgatagagcagcctgagataatcggtcaattgtcacaaggagttatagagtgttcggaaaaattcatgtggagcaaccggataaaaatattcaatgaggtatatgaaagaatctgcaacaaatattctattcattaataaaaaacaacattatcagatatggaacaatcagaagaactaaaagagttaaaagacgcattggagatattagagtatcattattcagaatataaggaatacaagtccaagtccaaacgtggtaggtcgaaagacagagaatatgcactgtctgaaatgatggcacatgcaaagttcttgcagaattgcctgtcaacccccaccatatttccccttattgcaaacggcagtccattccaacttgaaagcttttggaaattcgccgacagtgatatgccggagtacttagaaaaaataaagagacgaatagaggagcttgaaaaacaattcccagtttgagcttgttgttgtcagaaaaagatgtatttttgtaaaggattccatcaattgcaacaatatgcaatcacataatttcaactttgaagaagaaaaggccgagccgtaaaatttaaaaaaacaagaataacaccgcctattaaccgttttttattactaaattcgcaaaaaagaataagaacggaacccaaacaaataacagtatggcacaattaatcatcaagaatataggccccattaaggatgtagatattacactgaataaagtgaatgtcatcatcggaccgcaaagctccggcaaaagcaccatcaataaaattgcctgctactgcacttgggtggaaaagaaggtatcccttgaccaaagctttgacttcttcctcacaggaaccaatttcttggatagacttgtggaattccataagatgaaagggtatttccgacaagaatcgtacatcgaattcagttcagaagtgattaagattacctatgcttatcaggctgatgccattcccacattcgagtgggttaatcaatacggctatcaacgtaccaaaatttcatatatacccgccgaacgtaatgtggtatcgctcattgccggatgggaagaggtaaaattgcccaacaacaacattttcaatttcatgatggactggaacatggctcgcaaggcgtacacacctgcccacagtctgctcatcgactatatcaagggtaattattactatgatgaggaagccgaaacggactttttgcaaatggaaaacggagacaaaatccaactgacgaatgcttcgagcggacagcaatcaatgattccgttgtatctgctgatacgctacttcacccaatccatctatgagaaaaaggaagataccaatgtaaaaaataaggagagagaagttaatctgattcaacaactgtttttacatgcctttcagagcataaaaaacaacacctccatcttgaaggaaaacgaaagcatacaggattttatagaaaccaacttgttcaacgacaatagcagcaacagtgaactcaccgaaaaaggcgcacggttcttggattcattgtcgaaaagtttttctaatttcatcgacaccaaattcacaagtctatttattgaggaacccgaactgaacttgtttccctccacccaacgccaattgttttatttcattcttcaagccatacaaaaaggcggtcataggctcttcgtcaccacacatagcccatatatactctacgcactcaacaattgcatgatgggggcgctggtgaaagatgaaatgcctgaagagatggcgcaaaccttggaaagctgtcaagcatggatagcacccgaattggtgtctgcctggcagattgaaaatggacagctggtatctatacaagaggaacaaacacgtaacatcggcaagcactatttcaaccgcatcatgaacgatactctggatgaatactacacgatgctgaacttcttcaacccccaaaagaaatgaaagagagaatcgtccgtacatttcgccgggtatacaatcgccattctttcattgaaacagatggtctgaaactttatgtggtggatagagcagagagcgaagatggtgaggtagaaataatggacaaggaagatgatagcataaaagctgtgtgtttggaaaatgaaaacaacatagaggtgttttttgatggatttaaaaaaaatgcactacccattacaaacaagctgtattccaaacagtgtgaatgtgccattttacctcgcgaagctgatacagaggagtggttgctgtttatcgaaacaaaatatgcgacagacttggcaagagctcaaaaagcagaagctgattatcccaataggatggttgagcaaattaaagcaacagtgcaatattttcgttccaagggcattattgacccagaaaaagtagtgcatgccattatctcttttcctaatttagtgaatgaattcaattcatgggtctttccactgattcacaaagacggcacagaagaatccgttttggatattcgcttgaatgacaagattattatccgcgccactaatcatgcaaagattgtaaacgaaaaaacacttctcttgttatcctaaaaatctattagaaactttctgtaaaaatacgcacatttatcatcatgaggagaaatcaaaatcctcatgacactttatcatattgttcaaaatgaaaatcttacttgcaaacaagttctactacagacgtggtggagactgtgtgtgtaccatcaacctggaagagttgctgaagtcacacgggcatgaagtggcgatattcgccatgcagcaccccgatacgctccctactccatggagctggtatttccccagtgaagtgaagtttaaacccggcccgggaatgattgaagccttcctgcgaccattcggtacaagggaagtaaagaataaattcaatgcactgctggatgatttccaacctgacgtggtacacctcaataatattcactcgcaactgtcaccgttgatagccgaactggcacaccaaagaggcatcaaagtcgtatggactctgcacgactacaagctgctatgcccacgctacgactgcctgcgcgacgggaagaaagcctgtgaagaatgcttcacaaacaagcataaagtactggaatacaaatgcatgaaaggttcggccgtagccagtctgctcgcctacaaagaagccatgaaatggaacagggaacggatagaaaaatgcacggacatttatctttgtcccagccgattcatggcaaacaagatgacagaaggaggattctctcccgataagatacacaagctgtgcaattttatcgatgtggagaaatgccggaaagactcatactccaaagaagattactattgctttatcggaagattgtctcacgaaaaaggtataaaaacactgatagaatcagccaatagccttccatacaaattagtgattataggtggcggccctctggaagaggaagcaaaagcacaagccggaaacaaggtggaatttgtagggttcaaacagtgggaacaaataaaggaaatagtgggtaaagcgcgattcagcgtaattccatcagaatgttatgaaaacaatccgctatccgtgattgaagcccaatgcttgggaactcctgtgctgggtgcacgaatcggaggtattccggaactgattgaagaaggtgtaagtggcatgacatttgaaagtcgcaatgtgaaggacttgaaagagaagatagagagcatgtttgctacttcgttcgactacagagtaatcgcagaatcctcgcaaagacgatataatgcagaaaattactataaccaaatagtagaaatatataaataaaattatcaataaaacaaattatgagaacagtagtacaaggaagtctgattacaacttttcgttgtaatgcaaaatgtaacatgtgcaacatctggaaaaaccaaaccaaaccggaagaggaaatagattatcattattatgaaaagcttccaaaaggattacgcataaacataaccggtggggaatcgaccatccgcaaagatattgacgagatttttagagtgttatatcctaaagcttctttattggaactcagtacaaatggattcaataccgatacaattgtaagattggcaaacaaataccccaatatacttattcgtgtcagtcttgaaggtctgccacaactgaatgatagtaaaagaggtacagtaaatggtttcgaccacgcattgaggactatgctggagctaaaaaaaaccaaatgtaaaaatataggcttctcggtagtcatttctcccgataactataaagatttgctttatttgtatgacctatgcgtagcccttgacgtagaattaggtaattcggttgtacataactcatggtatttccataaggatgacaacctgctgaccagccagaatgctcttactgaacatgaaaaattcgtaaaagctttactgacatccaaaagacgaacattgaaaagcagactgaaagattatggcagagcctatttcaacaaaagtatccatagaagattgagaggggatgaaccgggctacagaccggaatgcggagcattacatgactttttcttcattgacccgtggggaaatgtatctccctgcaacggttcttctgaagaatggataataggaaatataaagaatgattcttttgaaaacatcatgaactcagacaaagccaaagaggcagcacagaaagtaaaagagtgcaaatgcaattgcgctttcatcgtaactgagcgacatgatatggtacgtaaaccctggaaaccgattttatggattatcaagaacaagataagaattgcacaaggtaaaaacatctgctggtaacacaaaaagacatgaaaatatatgttttaggaaccagaggatttccgcaaatacaaggaggcgtagaaaaacactgcgaatccttgtatcctctttttgacaatgaattcaagttcaccgtatttcgaagaaaaccttatataaactcatcactgacttacccaaacattaagttcattgacctcccttctaccaaaataaaaggatttgaagctgtatttcattcttttttagccaccatatcagcgtgctttggaaaaagcgatgtggtgcatattcataacattggtcccgcactttttgctccattactcagattacttggtaagaaagtggtacttacctaccacagtcccaattatgaacatgccaaatggggaaaagtggcaaaacatatattgaaattcagcgaaagtattgcattgaattgttcgcaggcaattatttttgtaaataaattccaaatgcaaaaatatccggcaaaagtacaagagaaatctgtttatattcctaacggaatacccaatgtacaaccgacctcgaaacatgattacattagtagtttaggattaacacccggaaagtatgtaatcggcgtgggacgtattactcctgaaaagggtttcgatgtattgattcaagcattcgagaaactgaataccgactataagttggtgatagttggtggtgtggaggcagaatcggattacgaagaaaaacttaagaagttgataaagtccaaccgggtggtctttacaggatatatctttggcgagaaactcaacgaagtgtatagtcatgccggagtgtatgtgctttcttcgtataacgaaggattcccgttggtattattggaagctatgagttatcaattagatgtactggtgagtgatattccagccactcacttaatagatttgaaagagtctgattatttcaaaccaggtgatgtgcatgatttggcttgccacttgcaacaaaaattagcgcccccccaaaaacgtacatataacttgtcggctttcgattgggagaaaatagcacaacaagtaatggaagtatataaagaagtaagaatacgaaaagggacttgattactctctacttgtgaaaaaaacatcctaaactatgccattatggaagattttcaatatacctttgccgtaaaataaaataagaatccatgtgtaacgataaaggcttaaaaagaatatacaacattcaacatcattattttccgattataatactgttgttattgttctgcatgagacatactattatttacagttggatgacggtaataggcaatccgctatttggaaaaattggcagtatccataattttgtgtaaatagaaacgggattcagttataagttctcttatatctggattctgttttcaaaaataagcataaattggttcataatcaatccccagttagtaatcggcattgtccatttcttctcaatctccatcaaagcgaggtataccattttcttcacagcatcatccgacgggaatgaaagctttgatttagtgtactttctgatttttccattcagattttcaatgagatttgttgtgtagattattttcctgatttccaatggaaactggaagaaaacagtcaggtcatcccagttattcctccatgagaggatggcataagggtacttccctccccatttcttttccagattatccagttccacggcagcagcctccttgttgggcgcgttatagatgttcttcatatcggctgtaaactctttcttgtccttgtaaacgacatatttacaggagttcctgatttgatgtacaacacatatttgcgtggaagactgaggaaatacggcacgtatggtgtcggtaaacccgttcaggttgtcagtgcaggtaatcagtatgtcctgtactccgcgggccttcaaatctgtcaggacacccatccagaatgaagaactttctgattttcccacccacatgccaaggacttctttcaagccgttctgtttcagaccgacacagagatagacagtcttgttgatgatttttccgttgtcacgaaccttgaatacaataccgtccatccaaacgatgagatagacaggatccaaagggcggttctgccattcctgagcagcctggttgactttgttcgtaatgatggaaatggctgatgtggacagttctatttcatagatttcacgcatctcctcttcaatgtcggacacgctcattcctttggaatatagggagataacaagtttctctatggaaagcccacgactctcgtgtttgggaacaactatgggattgaattcaccgttacggtcacggggaataggtatgaccgcttcaccgtgttcagtttggattttcttggggtagctgccgttacgggaattaccgctgttatgaccggaaaccgaattcttctcataacccagatgcgcatccatctcaccttcaagcattttctccaatacctgcgcgtgtaactgcttcagaaacttgctgacatcagcttctgtcttgaactggctaaggaactccttacttaatacctcatcaggcactacatgattcttctctttcataattttcttcattttgcaaagctattaaataaaaaatacggaacccatactgaatcccgtattttacatttacacaaaatattttatagtgccgaaaaattgaagacacgccatttaatgacattctttttatacttctcgtacttattcctttaataagttttatatgtatttgtaagaacatcaccaaacgcttcatctgtaaaacaatctacttaatgcttggcatactaacattttatatatatgttcgaataacacctacatatagggaattatgtacgcctttttatagtgaatacctcaatggtttttattatgtcgacgcgagcatgttctgtttactaatgcaaatagccatcttatcgtgcctttcacacaaaaaaagagagaaaccctcttcacctctggcagtacccgcaataaccctgcacgatgacacttgtccatccgatgatattctacatagaaaagaagaagccaatcaactggtcgaatatttggaaaagaatcctgtatactccggtgcgataggagtgtctgtagagggtgaatggggatgtggaaaaaccacttttctacactatatggaggaagaatatatcaaaagagaaatacatcctatttggtttaatccatggaaagacaatatcaaagacatcaaatcgtctttcctaaatctattgtacagtaaatttgaaaacaacgatgtaacaacttctctactgcgtaagtatgaatcgaaaatcaaagtgaccaacatcaccaattggttctctttaataatactttccgtgaagcacttattgggaaaagaagagaaggactttgctgacattaagaaggaactaaatcaacaaatgtcaatggaaaaatatacaaccgtagttttcattgatgactgtgaccgactggaaaacaacatattcgtggaagtaatttcacttattcgaaccgtggctgacctacctcgcttcactatcattgtaacttttgaccctaaccaagccgaccgggttcttggaaataatggtggaaaaatgtacttaaaaaagatgttcaatgtaagccacaaactttttactctaagcaatggagaactgagtctatatctctacgaagagatgaaaaagatgaatatgcctctaccagagcaagagaatccgtttgaaacactctcaatcaaggaattcttacccaccatacgagatgccaagcattatctcaatcttctcagccaagatataaagagctatcttggcaaagaagatttcaagaatctggtatggagtaaatggtatttggtagagttactaaaacactgtgattcatatctctatacccaactaaaaagcacgcctgcccgatggcttgacacatccaaaaaagtatgcaagaattgggaatttgtagtaccccggcaagaatggatagaagcacaagataaagatataaaaaggattctccaatccctgttctgcgacacgacttcatcattcagaccattcgacattaccaataccctatactatcagcgttatttcactccatctatgccatcgtattttctctcttataaagagttcgccgaaatagatacagataaaaatcttcgcgacacttttgaaagcctaataaaaagtggtaaacagaatctaccgcatcttattatggaaaccagtcaatctcaaggctattattatgtgctccctattttagaagcgtatgtatccgcaaaacagaaaatttcacacttcaatacaataacatccttctataccagtacctattacagagaaactgcaaatattataaaagatgaaccatggctatgtcaaatgacatgggaatcattgggcaacactggatttaatgaatataaagaagaagacaaaaaaggagttcccttttttgaacattacttgaaaaacacaaaagacataacagcacttgcggcacttttctgttctgtaatgcatcaatatagtcctactgaatatttagatgccaaccatttcttttacctattactgaaaaaagaaatgaccagttcttctccagattacgcaaacatgttatggatgatagcggattgtgtagatccaagcttaaacgaactatttctcgataaatttcttgatgagcacttccttgatatattacctcatatctttacattcgtaaaaaatgaaaatgacctatacatcttggcaaaacacgacggtttaagaggtatctttgatacaagcagacattttaaacagaaaataaacaaatggcaacaagaaaaaagatacccggaagtattgctcgaagaagtgtcatcccttgtattcttcacgggaatatatcggaaaggaaactatcaaaacctgcatgcttcacatcatccacaactaatgaagtacaagcctaatactgtgttaaacactccaatcacctccctaaagataaaatatgacttttggaatgcggaaacacgttttaacctaactgaaaacttttactttgagattgacccaaacagttaagaaacaaaattacaggtaccaacctcgtcaaacctatttcaaaaatattttcagtgggaattaatacccaatgtatactcataaaaagaggtaaaatgcaaagtagcagaagtatacagaggctgtgtgtcaccccggtaatatgaaaaacagcactattggagcaacagtttagtgttatttcccctttttctcttgcatatcaaatacatttgacgtaattttgtcacatataagatatatccagatgccggcacaaacctcttttccatgtgaccggcaatagcgtagcgtactttagactcatcggacaacaacgctttaaaatcaagaattacatgaaattcagacaaggacttatggtctgttgcctgttgtgctgtgccctcaaggtacaagctcaatattccatgggtaacaccgggcagctaaacatacccactgccgagatgcaagaggcaggtacttttatgggggggaggaaactatctcccgaacggcatgacaccgtttaacttcaacaccggaaattatttcgtcaacatcacatttctatcctttctggagttgagttatcggtgtacactattgaaaaccaaacggtatgacggcaagaaaggctacttccagcaagaccgctcaatgactgcacgcatacgacccctgaaagaaggaaaataccggcccagcttggtggtaggtgtagatgacccttttaaaaataccggaaccaactactttgcctcagtttacggtactctgaccaaaggtttctccatcgtaaaaggtgaccgcctggcactgacagcaggctactatatcccactaaatgaccacagcataaaagacggccccttcggaggcatcagctactcccccgctttctgccgggagatgactgtcatggcggaatatgattcggaaggtttcaatatgggagctgccgccagattatggaagcatctctccatccatgtgtttaccagagaattcaacagcatatcgggaggaatacggtatgaatgcaggctgttgcattaggagaaggattagggattaaattaaggagaaggattagggattggagaatagaatggatattaagagaaaaggcggtttgaagtggatgcttgcggcagtgttcggttgcttttttgcaacggcagatgctcaagtgacagagagcttgaaagccatcgggatggaaaacatccgatgtgtacagacaccggggatgactaccgtaagctttgagaacaatgtgtatagaagttcctgcaccggggtgggcaaagccatagatgcctgcttgggaagcaagacgaagggagatttgcagttagtggtactggaaaacctgataccgaagctttgcatcaatctgccggacacgctgacggaagcatacagaaacggggaaatcagcctgatacaggtatatcggcagatggggattacagcggatacggaccctgccatgaaggtattgaaaaacgccggtcgggaagaagcgccgtctgcctggaaggtggatttggtggtatatcccgatttgtttttagagaacaatacgtttgacgaactgtatacgtatgccatcaacctgaatccggctgtggaaatggctctgtggaaaggcgggaaaatgaccgcacaagtgatactgcccgtagccaccaacctgagcggagagatgaaccggataagaccgggaatcatcgctttatctcaggaagtacgtttcaggcataatatcttcgggaaaatgacggtgggcaactttaccaacaaccgctacggtgcgcaactggaaataaaataccgcaccgacaacggacgctgggaactgggcggaacggcaggctccaccggtttctccgccgtcacccgggaagacggatggtatatgggcagaaaacaacgtatcaatgcctcgctgaacgcttcgtactacgaaccgcacctcaacttgcagttcgacctgaaagcagggaggtatatttacggtgattatggagtgagaggagactgtacgcggcacttcggagagtatgccatcggcttgtatgccctctgtacggacggagagataaacggaggatttcattttgccatccccctgccgggaaagaaatggagccagaaaggattcttcagggtaaagcctgccgactactttacatggacatacggcatggtggcagatggagaatacatagaaaaacgactgggaagaagttacagcacacgccctgacgagaaccggagcagcaacttctaccagccggactatatacgctacttccttataaaagaaatacaacgggaactatcaaaagaaatacaacgggagttatcaaaataaatattaattaaacacttgaattttattaattgacaaagttatgaaaaagaaaaatttgttttttggaggtctgctgatgtttgccatggcctttagtactgtagcactcatcgcctgtggtgacgatgacaaagagaatgaagaagtagtagatccgctggaaacggaaaaggaatattacattgtgggcacagtgacagctaccggcggtgcattgaccggtgcccaggtagatgccggaaacaacctgacagctactaccgatgcacaaggcgtgtacatgctgaccgtgaaagaaaccggtgaatataacctgaaattcacagctaccgacatggaaagcatggaaagcaaagtgaccattgccgcaagcgccgccaatcgtacacaaaccactctgaatgtgaaaatggcgaaagccatcagctttgaaaatgtagaagaagtgacagtagaagctgacaaggaaaccaacgtggaagctgcccagaacgaaacctctgcggaagaagcagccactaccacaaccgtatccgtaccggcacaagctgctgaagaaggcacgactattgccgccgtaacttacgaagagccgaaagccagcacaagcgaagaggtggcagaaactccgaaagaagaagcggtgcccgtgacggcagtagccatcaaagtgacaccggaagatgcggtggccaaagctcctattgaaataaagacagcggtaacaggtagtgcaagcaccggctcttactttgaccctgcctccatggaagcgttgaaagatgctgttgtcacaagagctgccgtacactttggagacgtaacctacaaagacggcaactacgtcattacaattcccgaaggcgaaaaaatacaaggcaagtatctgaccaatatcctgccaagcaaaactgtaagcaaaatacagcaaggcggatataacaccgtgaacggagaaaacggtgtaatcaagattgaaaacagagattactcggcactgaccgccactctgaaggtaatcaccaagtgcggctgggactacaccactaccccggaagctgcattgcaagccgtgggagcctctaaaggactggcttctgtcatcgaaaagtgtagcaccaacgccgaaggcagcaagaatggctattacaccgtagaaaaagaattgaagaccgccatcagcggaaacaaccaactggttttcggcagccgcagcaaaacccagacgaagacatatacattccccgtattcgtaaacggtgcgaaaaaacaggtagttgtccaactgaattgctacacgggctataccgaagaatacagcaatacccctatcaacaagcattcaggcggtacaaccggaaaataaagcgaacggcataacctataatcccctttaagcaatttatctgcctatgaccatagccattgattttgacggtaccatcgtagagcaccgctatccccggataggagaagagattccctttgccaccgctacgctgaagatgctgatggacgagcgccaccggctgattctgtggacggtacgtgaagggaagcttctggaggaagccgtggaatggtgcaggaaacggggtgtggaattctatgccgtcaaccgggactatccggaagaagacatcgcacacaccggtttttcgcgcaaagtaaaagccgatctctttatcgatgaccgcaatctgggcggactgcccgactggggaagcatctaccgcatggtgcatgacgggctgacctacgaagaactgtttcgcgaaaacagtgaaccggtccggcagaaaaagaagggcttttgggcacgtttgaaaaaataatatccaaataagatttttgacttatgtcaattcataacccgcaaaaaccttctaattttgtactcgaaatagagaaagattagttttataagagtaaagagattagtttttagggtgcactaaaaaaataggcaatatccaacaatggttattgcctatttttatatatagccggaagccaagtacatcaatacagacttcccaggccgacttccgtaaagagcttcgccaacttctccaccaccggtttcatataacgttttcctttctcggcagaagcttttttggggttccctaccccgctgtcgactgtagccttatcccaatggcggggagcccagcccaccttttcattcagggaaggaatagcaaacggtcgggattctccgtcaccggcctcagccagattcaccagctcgggatggtaatgcatcatgacggaagtctcagactcgccggcatggtcgtcgacaacagcctcaaagtagtctttgggagggacgatgctgaaccagtcggcagcgataatcagaaaatcgggatacacaaacgccaggtcacgaatcattcccttgaagttgttgccgccatgaccgctgagaataatcagcttgcgcatgccttgtgcatagagggaggcaactatgtcttccagaatggcctgctgggtggaatagcgggtatggatgcagaacggaagttcgcgctgccccggattgtgtgcaccgaaaggtacgggaggcatcaccatgcagcgtacaccggaattctgtaaagccaatgcagccgcgtctacggcaatgtcatgcggcagaatacaatcagtgagataaggcagatgcagattatggggctccgtagctccccaaggcaggatgacaacgtcatacttcactcctttcacctttccatagcaggaaacagtaaggtcaatttctcttttttccatgatagtttattttgggggtaaatctttaccgcaaaaataaacattattccgtcacattgaacctattgccggcgatattctttaggtgacataccggtgtgatgcttgaaatacttgccaaagaacgactggttggcaaagtgcagctcgtccgcaatttcctgaatgctcagctcggaagacttcaacaaggctttggcttccaaaacgacgagactgtcaatccattcgcctgccgtctttccgctgatttccttcactacggtggaaaggtgcttggcggtgaggaacatcttatcggcataataggacacacttcgctcttccttataggactctgaaacggcacggataaagcgttcgaacaagtcttccttcctgcttttgggtatgcgctcctgaacggcatgcccttgatagatgttgtatatctcatagaacagtgccagcagcaatccctgggtgatttccttacggaaaggattgtccttcagcttcaccttgctccagaggaaagagtgatactcctggaatgattgggattcctccggagtgatgtggacgaaaggccgttccttaatcatgaagaacatggggaaaagctgttgcatggtgggtatcaccatatccataaaatcttttgagacggcaatgaaaagtccggcaaagtcatcggagcgttctccttgcagaacaatctggtcgggaaggataatacccaacataccttcccgcatttcacattgctgcaagttgagttccagtttgcaccaccctttcaggcagacagtcaggcaagcagcattcaaacgggtgggataagagctcaaagacatgtccttgatgtcatcaaaaatagcaaaatcattgccgatgaaatcgatcatcggcaaatgatgtatctgggaaatatctacattccgtattctcttagtatccatggtttttgtgctttggcgacaaatgtaggactattttgcggaatttagctctaaaaatccttaaatggaaacttttagttcattatcttgaagccgacaaagaaggttctcggctgcgtaggtccgtagaaatagcccgcatcgcggaattcccctttatccaggtctttctggaaactgttgaagatattctgtacacccgtattcaactgaagcttgatatggtcgtgaagcacaaacgtatagttcagcttcacattcaggtccaggaattggggagtatgctccatgcggtccgaggtgatattgcagaaggcaccttcgggagcatcttccggtgcgtagtgcggaacaatcatctttcccgtataagtgccggaaagggagaagtcgaaattcttcaccggcgccgaggagaaagtgaaatatccgtaatagtccggtgtacggggcatgcgcttggtggtaaggtctttgccgtccaccttcgtccaggcttcctcatggatatagcggctgcgctgcgccgtgaagccgagctggaactgcgcctccttgccgtgggcaatcttcgcatccagattggcaccgtatacgcgtgcgccgtttccgttgcggcgctccttgatgacatcccctacttcgttcttgccgatatcttcgagcacaaagacgtggcgcaggtctgtatagaaaccctccaccaggatgtttgcctgccagtgtcccagatgggcagtccagtccaccgaaccgctgtaactgttggagcgttcttcactcaggttatcggcgagtttgatttggactcccttgccgcctactgccgtcacgtgcaagtcctcatcgtatgcctgcggagcgcggaaaccggtagagtaagtcaagcgtgcctgaaaatcatctgccggcttgtagagcaggttgacgcgggggctgaaaataagcttgtctatcaggttgtgtttgtccaggcgggcgccgaccagcatggtcagtacgttcatcttccactcattctgcacgaaggcgctggcaatgcggacatcctgctccatgtcacgatgatagccggtcatgatgtcgtgcagggagttgttctgatattccagtccgccggtgaaggtggcgggggcaaagaagcagttgtccatattgcccacatacatgccgccggcaacccaggtcaggtctttcgtcttgccgtaggcattcatgttcttttgggcaccatagtagctgttgcggtcggtgtgctggatggaggtgtaagccgaaatcttatgcttgtactctttccagaacaaatcataactcacgcctccgctattgatgatatgcttggtctgctcggtgatgtccgtctcgtgcggctgcaaatcgaatttgttgcctccgcgacgaagttcgttggtggtatggtattccagattgatgcggctgaaatgcgtaggacggtaataggcgcggaagccgaaagtattcatgttcagcttgcccagctcggaaaagccatcgccatcgcggtcgtaggggttgcggttgcggtaactctcataaaaggcaatgccgtaagagttatctttggcaaccagcgacacattgccacccatatattgctcccaggacttgccgtccatattggagaacatgctcgatacctgaaaggaattgttgatggggtctttggttataatattgatagttcctcccacagcattggccccaaacaaggcagagcctccgccacgcaccacttctacccgttcaatcatgttcacggggatttgctccaatccgtacacaccgctcaatgcactgatgatgggacggctgtttatcaatatctgcgaatacggaccttccaagccattgatgcgcacctgggggaaaccacagttctggcagttgttctccacacgcaagcccgattggtagttcagtgtcttggcaaggtcggtggagttgaccatctcgaacaatttggtactcatcacatttacaactaccggagctgccttgcggcttacctcgttgcggttggcggataccaccacttcatcggtcatgaaactctcctcttccatcgggaaatgtatgacggcagtaaagtccttgctcaccgtcacctccttctcttgggtcttgtaacccactgccgacacacggagcttgtattttcccgccggaagcttgcggaactcaaattgtccttcttcattggaaaccgttccctgaccactgccgataatcaaaaccgtggcatacggtatattttcctccgtacctttcactatcacatggccggaaatcatattgccttcttttataggatttacggcaaaagctacgctggcacttaccactgcaagtaccaacgccaaaatgtattgtttcatcaaattagcgctctaaataaaaaaaataattcaagtctgaaaaaagataatcatccgagatgccgcacttcgttcactgaaatgccggacttcgagactaaaatgcctggtatctacatacaaaaaatccaggcgtttttaaacctaatgactatgaaaaaagagcgggaggagcgcgaagggaaagggtacgtatcacttcccccttaacagtaggtgttgccggtttggctctgagcatggccagcaaaggacgcatcgggtgctgaatctcatacacatccaccccggaagagtagaatgccgacaaatgcccgatgaccagaagggaagtctgggagtgagagtgtgtgccatgaaaagggtgcgagtgcgttatcatcaccccattcacataatggacgtgagtgaacgcagtgatacttgcctggtacatgataaacagtaccagcaagctcaatgcacctataatttttttcttctgcttcacgtccaaaaacttatactatagattttgagccgcaaagatagtgaattattctttaactttgccaaacaagaactcataatcacgcttggaagccggagccgcccactcttcgggaataaacttccactgattcagcgtacgcggttcaatcaccttcttctgctcaatgtactgcatcagataatagcgtaagtccttatccgtagagtggatgatgcgttccttcaattcatcctgcgagatgccggccccctttgtcagcaattcgccgccaccgtttccgcgataagaattcaccgctaccttatacattttatccatatcgaacggagtaccgtctgccatactgagaatggctaccttctcgccatccggcttggtcacatccaccgtgtagataatacccgccgcagaatcgaagttgaagctgaaattcttgaatgaggccctatccgtagcaccttcgcggagcttctcacggaagagaaggatatggtcgtccggaaacttcatccgattggtccacaaatcatacgacatctccaaggcatcgcgtatctcctttcccgtcagacgcatggtgtaaagcatattttcgtacttatacagattgaacatatcgttcacaaaaatgtctcccttgcggatttccgtgtcataggacaagggagccgcaaaagaaatatccgccccgctgattgccaactgcaattcatggataaggtctataaaagcggaagagccgaaataggcaggacgtgtggagatggtctcggtaaaagaacctattttcttggaaacaaaattctgcacagctgcatattcgggggcaaagcgctgcatgaactcttcgctgacgccgtagtcttgcgtatcggacagtatgccgtctatcttcttgtctataactttaccatcacgcaatttcaaggttatgtccacattacttacaacaacaccgttactggcagggtccattaccagtaccgagtcaccgactatgttgcacaccctcttgcattcgcgcgcatggtcgtgccccatcaggacaatatcgaatcccggcacgttgcacgccacttccaccgaagcgttttcgcgatacttgcctcccatcagctgggcatcctggccggcatggaacataccgataaccaaatcaggcttttcctgctcacggataatcttcatccatttgcgggcagtctcctccatatcgtcgaaacgcagccctttccacagattctctgaaagccatacggggatggcaggagttatcataccgagaaccacaattttcactccgtcacgttccagcacctcatagggtttgaaatgggtttctccggtagcagtatccacaatattggcacccaatatcggaaaacggcagtcacctgcccaacggtcgaaaacggtacggccggtctctacgtcatggttacccatattgccggcattataccccatgaaattcatcatctccgctgccagatgaggggcaacggtatctatgtaattataataataggctgtgggctgtccctgcagaatgtcgccattgtccaaaagaatcaggttttcgccataagccacacgttccttttgcaccaaagcatgcacacgtgccagactgccggttgcctcccggcggcgtataaagtcgtagggatagtagtttccgtgtatatcactggtctgtacgactttcagtttcacctctctttcctgcgcaggcagtatgcttgtcaggacaaaaatccagataaaaaaacaactaaatcttttcattatatttccttatttcttgtcggttcttataagttcataggatgggtaaacataaaccgcgctccatccgtataggcaggatctatccaaatctcgccgccccacttctcaacggtcagcttacagatggacaagcccaagccggttccctgcacatattcgttcagcttctcgaaacgttcgaacacccgtttctgtttgtccaatggaatgccgcaaccagtgtcagtcaccgagaatactgcaacattccccgccgtatccggctccagcttcaaggttatcgtaccttcttttgtaaacttgtccgcattggaaagcagatttatcacaacctgctgtaaacgctgcacatccgtccgcatctccactacctcacgttcacactcaaataagaattgattggtcgacctgcgtgcctgggccacggaagctactacttgctggcatatctgcactacattgcagctctccaaagaaaggatgacgcggtcggcctccaaacgggacacatccaatatgtcattaatcaaccgaagcagcaaatcagagttggtcctaataatctcgaaatagccacgctgttcttcttccgaggctcctccggcagacagcacgtccgagaagcccacaatcgcattcaatggagtacggatttcgtggctcatattggcaaggaaagcactcttcagacggctggattcttcggcacggtcctttgcttcgcgcaaggcaccctcggatacctccagttcatccttcaacttctttgtatgataataaaagtaaagggaaacgaacaaaccgcccaacagcaccaacagaacagcaccgaccgaccagatatgatacttgtactgttcgtagaaagaaggggttacgttcagcatctttaccggctgcggaaggccggtgatattcagtttcttttccttcacaagtttaccgtccagtatggtctcattcggaatgatttccatatgggtctcactatcctgcgaggtggtcagcaggcggtaggactgtcttgccatctccttgcccaaagcacggtaggcaggaacgacacctgccacagcccaatatcccaagcctacggaactgagcgagaaagtgggcaaagtgggagctgcttccatcatggcgtaggttgcattccgcatgaagtaaccatcgttcatgtccacacgccatgtccccatcaatatagctgtattttccggtaactcatgcaatctgtcacaaatggtatatatggtattgacgcgtccgtccagcaaaatcaagtttagttccggaaacttctgcatctccttcactacataggcctgcatggcaacaccaccataactgttgtctgagacaaaagcgatattcttggtgccgggatacatctgctttatcatattgatgttggcctccacatcatactcataaacgaagccggtcttgataggcgaactggggaaatccgtgaagaagtcgacggattcgggcatccaggtcttcaggtcaacggtatcacccggcagcaatatggcgttccggctggacagtgcactcactaccggagtattgccgcatatggagtcttccagagaaagataggcagcccaggcttcctgccctataagtacaatcagcgccggacttttatcaccttgatatttagccaacagctcagccattctcctctcccaaagaggggattcggaaaaactcttgcagttcatgttctccaatgcgatggtgtttgtcccgcccaggcgttggaactcctccataaagtcggagatgttgccggaagtacggccggcatccggattataggaactgataatcagtaccggatgctctcccgtaatagaaaaagcgggcaaaaggcaacagaaaagcgctaccatgcatggtaatattgtacgatatatgtgtttcaattgattgattcgtttaattgctccatagctttgacaaatatagataaaagttggaacctaaagaaaaaacaacaattgtttttttgtacttttggcacctattataaaatgagatacaaaatgatacaagattttcatcgaatgatatctgccgctctcggcatatcagaaagacaaataagccagaccctcggcctgctggaagacggagcgacaatccctttcatcagccgttaccgcaaggaagcaacgggaggactggacgaagtgcagattgaagctatccagacgcaatatgagaaactgaacgaaatcgccaaacgtaaagaaaccatcctgaacaccatacaggaacaaggtaaactgaccaccgaacttcagaaacgtatcgaggagacttgggacaataccctactggaggacatctacctcccctacaagcccaaacggaaaacacgtgccgaagcagctcgccaaaaaggactagaacccctcgccaccttgctgatgctgcaacgtgaacctcatccggaggaacgcgccgccagttacgtgaaaggagacgtgaagaacgtggaagatgcactgaaaggtgcccgtgacatcatagccgagcatgttagcgaagacgaacgtgcccgaaacagcgtgcgcaacgcatttgcccgccaaggcacactgaccgccaaggtggtgaaaggcaaagaagaggaagcgaccaaataccgcgactacttcgattgctccgaatcgttgaagcgatgcagctcccaccgcctgctcgccatccggcgtgccgaagcggaaggcctgctgaaagtcagcatcagcccagacgatgaggagtgcgtggaacggctggaacgccaattcgtgcggagcaacaacccctgcggacagcaagtggcggaagccgtgcaggattcctacaaacgcctattgaagccatccatagagacggaattcgccacgcaaagtaaggaacgtgctgatgaggaagccatcaaggtatttgccgaaaacctccgtcagttgttgctggcttcaccactggggcaaaagcgtgtgatgggtatagaccccggatttcgtacgggttgtaaagttgtgtgcctcgatgcacaaggaaatctgctccacaatgagaacatctacccccaccctccggtcagcaagcagaaagaggcatttgccaagctgcaaatgatgatagagtcttataagatagatgccgtagccataggtaacggaactgccagccgcgagacggaggagttcttgaaacatcagcgcttcaaccgcgacatacagatattcatcgtcagcgagcagggagcttccatctattcggcctctaaaattgcacgggacgagtttcccgactacgacgtcaccgtacgcggtgctgtgtccataggcagacgactgatggacccgctggcagagttggtaaagattgacccgaaatctattggtgtggggcaataccagcatgatgtggaccaaaccaagctgaaaaaatcactggaccagaccgtagaaaactgtgtaaacttggtaggtgtcaacctgaacaccgcaagcagccatctactgacctacatctcgggattgggtccgcaactggcacagaacattgtgaactatcgcgccgaaaacggtgccttcacctcgcgcaaggaactgatgaaagtacctcgtatgggtgccaaggcgtttgagcaatgtgccggcttcctacgcattccgcaggcaaagaatccgctggacaatactgccgtacacccggaaagctattgtatcgtagaacaaatggcaaaggacttgggttgcagcgtagccgagctgatagccagccgggagctgcgtctgaagattaatcccgaacgctacctctcccccaccgtgggcatgccgacactgaaagacatcctgcaagagctggacaagcccggacgtgacccacgcggaccgataaagatatttgaatttgacaagaacgtgcgcaccatcaacgacctgcgcgaaggcatggaattgcccggcatcgtaggaaacatcaccaacttcggcgcatttgtcgatataggcatcaaggaaaacggactggtacacctctcccaactcgccgacagattcatatcagaccctaatgaagtagtgtccattcatcaacatatacgcgtaaaggtactcagcatagatatggaccggaaacgcatacagctgacaatgaaaggagtggaacagaattagtgattagggattaatgattaatggttagtggttaatggtttctgtattaatcattaatccctaatcactaatcccttataatagtgtcttaagataattactgtaccaagcactaaaagtagtgaacacagaatagagccttcgaacccgaaagttcctccatttatcagattttcttccggaaagtgaagaatcagcagattctcattgctaaattcatttccactgactttatatcccaaaacagaaccttgaatccagttccagaaccaatgcaaggcaatggggaaacagaggttgcgcgtgtatatataggaagctcccaagaaacaacccgccagcatgatattcaaaaacgggacgaaggcaaagctgggattgaaaagatgcatcaacgaaaataacaccgcagagataagcaatgccacaaacttattgacgcctccatccagcatacgccctaaaatgaaaccgcgtccaataacttcttccgtaactgccactaaaaaataaagcaaaagactcgacaacaacgaaatgggagaaaacaagacccctgccacttccacagcccccaacaataaagacaagccaaaaccaactacatacaagaacacgacaaacaaagctccgttcagcaggcttctgccccatcccttcaaagacaagcccaagctcgaaaaaggaagcttcctgaagcccagcaccatacaagcggcaataagcccactggccaacatcaagacttcattcaacatcattaaatagacgctcatcccaccagcttgtgtcttcaactcagggaaagcaatcgcaaaaggtatggcaaacaaaaacagaaaaatcataaaaagtacagtaaacagtactatatcaacgaatgccagccaaatacgttttgttttactcatagcaacacactcttccttcaccgtttcttccgtctccatttgtatctcattttgattaatatccgacaaaaataataataaaaagaaaaaacttcatgtattcctgccggtttcttcttatatttgaaaaatcaatctggaatcgacaaacatgaaactaagaaaaatacttttagccgttgccggactggcgttaatgctgaatgcctcggcacaaaaatccaaaagatactacgtggccaaacctggcaccctggtggaactgatgacagaagcggaagccaatgaaatcacccaactgaccctgcagggcaagctgaatgccgtagatttcaggcatctacgggatgaattcaaaaacctgcaactgctggacatttccaatgcctccatcagcatgtatgcaggcaagaacgggacttatccaaaccgtttttatgtatatcctgccaattgcattccggcatatgccttctgcaagcaaatggacaacagtacatttgtaggtaaggagacgctgaccaggattatcctttccgacaagaccaagaacatcgaagatgctgcctttaagggatgcaaaaatctcaagatatgccagatacggaagaaaacggctcccaatctgttgtccgaagcattggccgatagcgttacagccatatttgttccattgggatgcagtgactcctaccgtaccaaaaagaaatgggagacctttgcattcattgaaggagaaccactgacagtaaatgtgcagattggtaaaatgggcagccttgccagcgaactgttaagagccggatttcagcccaaagacgttaactttctgaccgttgaaggaaaaatggacgaagccgacttcacattgatacgcgactatatgcccaatctggtttccatcgacatgaccaacagtaatgccactgcaattcccgactatactttcacccaaaagaagtatctgctgaacgtacggctcccgcaagagcttagaagcatcggacagcgtgcattcagtggctgcggccgtttgtgcggcacgctggtgcttcctgccagtgtaaccgccattgagtacggagcatttatgggatgcgacaacctgcgctatgtgcttgtcacggggaataagattaccacgctaggcgacaaccttttcggcgaaagccaaggcaaaattatatataaggagaaacaataactcagactattccccgccttaataagaacaaagagactcttttaatagcaaaagaaggtgtgtcagaatgatagctaaaaatcattctaacacaccttcttctttttttcaatatcgcacaagcctttattaaacaaaaaagatatgaaagaagaatcgttccatcatgaggaaaaaatcgttccaccgtggtgaaaaaatcgttccaccatggtggaacgattttttcctcatgatggaacgatttaaaatatgcttatttagtccttagcttccgttatcactttgttgcgtacatacgtgcacgcaactccttaatgtggtctgaagtgatgtattcgtcatactccatcatcttgtcgataataccgttcggagtcaattcgatgatacggttggcaaccgtctgaatgaactcgtggtcgtgggatgagaaaaggatattgcctttataggtctttagattattgttgaatgcctggatagactccaagtcgaggtgattggtaggtgtattcagaatcaagcaattggcattgcgcagctgcatacgtgcaatcatgcaacgcatcttctcacctcccgacaatacgcttgctttcttcagcacctcctcgccggagaacagcatacgtcccaggaagctcttcatatagacttcattgccttcaccgaactggctcaaccagtccaccagattcaggtctgtattaaagaatgcagtattgtccagcggcaggtaagcggtggtgatagtcacaccccagttgaaagtacctgcatccggtttcatattctcgttgataatctcgaacagggcggtcatggcacgcgggtcgtgcgaaaggaatacaatcttgtctcccttctctacgttgaagttgacgtcgcggaacagcaccgtaccatcttccagcgttttcgtcaaaccggaaacttccagaatctgattacccggttcgcgttcgggcgtaaagatgatacccggatacttacgtgatgacggcttgatttcttccacattcagtttctccagcatcttcttgcggctggtagtctgcttgctctttgccacattggcactgaatcggcggataaactcttccagctctttcttcttctcctcggcctttgccttctggttctgctgctgacggagcgccagctggctggactcgtaccagaagctatagttaccggcaaagaggttaatctttccgtagtcgatgtccaccgtatgcgtacaaacggagtcgaggaagtgacggtcgtggcttaccaccagcaccgtatgctcaaagttggagaggtactcttccagccaagtcacggtctccatatccaagtcattggtaggctcgtccagcagcaagttatcaggatttccatagagagcttgcgccagcatgacacgcaccttttccttgttgttcaactcacccatcaacagataatgcttgtcttccttgatacccaagccactcagcaaggcggcagcatcgctttcggcattccagccgtccagctcggcaaatttctcttccaattcggaaaccttcagtccatcctcgtctgtgaaatcctctttggcatacagcacttcacgctgcttcatgatgtcccacaacaccgtgtgtcccatcatcaccgtgtccatcaccgtaaaagcatcccacttaaagtggtcctggctcaaaacggaaagacgctctcccggagccagcatgatggagcccgttgtagggtccagctccccggaaatcgttttcaggaaagtagattttccggcaccgttggcaccgatgataccataacagttaccacttgtaaacttcaggtttacgtcattgaacaacactcttttaccaaactgtactgagacattagagactgtaatcatctttatatttacgatttatttatttacaatttactatttaatacctattagtctgcgaattgcgagtgcaaagatagttatttttccatgaatagacacagagaagcgctgtcaatctgacataaaagtattacctttgcagcgttttcggcaaaaacatctattttggcaaagtttttgctggggcactggtatcgtattaacttaaacccttaacagcaatgaaagcaaaatcattttacaagaataataagcataacaatatgaatccgaaagaaaaagaaaacaaccaggaagaggagctgaaaactcaagctactcccaacgaatgtgacgaagaaactgtcggacaagaaacttcacaagaaaacgaagctcccctgacggaagaagaaaagctcgcccaggaactggaaaaggccaatgaacagattgaagagcagaaggacaaatacctgcgcttatctgccgagtttgacaattaccgcaaacgcaccatgaaggagaaggcagaacttatcctgaacggtggtgaaaagagtatcagcagtattctccccatcgtggatgactttgaacgcgccctcaaaaacatggagacagctaccgacgtaaccgccgtaaaagaaggagttgaactgatctacaacaagttcatgtctgtattgggacaaaacggcgttaaggtgatagagacaaaggaacaaccgctcgatacagactatcacgaagccatcgccgtgattccggcacccaatgaagcactgaaaggcaaaattctggactgcgtacaaaccggttacatcctaaacgacaaagtgatccgtcatgccaaagtggtagtcggagaataacataaaactgtatggaaaaaagagattactacgaagtattggaagtcgaaaagacagcaacggtagaagaaataaagaaagcctatcgcaagaaagccatccaatatcatccggacaagaatccgggcgacaaaacagccgaagagaaattcaaggaagcggcagaggcatacgacgtactaagcaatccggacaagcgtgcccgctacgatcagttcggtcatgccggactgggtggtgccgccggtaatggcggtccgttcggcggcttcagtggaggcatgtccatggacgacatcttctccatgttcggtgacatctttggcggacacagtggaggaggttttggcggttttggaggtttcggcggaggtggcggcacacagcaacgccgttaccgtggttcggacttgcgcgtcaaggtgaaactgaacctcaaggaaatctctaccggtgtggaaaagaaattcaagctgaagaaatacgtgccttgtacccactgtcatggtacgggagctgaaggcgacggcggcaccgaaacctgcccgacttgtaacggcagcggcacggtaatccgtaaccagcaaaccatactcggcaccatgcaaacaagaaccacttgtccgacttgtggcggtgaaggcaaaatcatcaaaaacaagtgtaaggaatgtgccggtgaaggtattgtatacggtgaagaagtagtaaccgtaaaaatcccgaaaggtgtcgcagaaggtatgcaactctctatggggggaaaaggaaatgcaggcaagcacaacggtgtgccgggtgacctgctgattcttgtagaggaagagcaagacccgaacctgatacgcgacgaaaatgacttgatttacaacctgctcctcagcttcccgacagcagccttgggtggtgcggtagaaattcccacgattgatggaaaggtgaaagtaaaaattgactcaggtacacaaccgggaaaagtactccgcctacgcggcaaaggtttacccagcgtgaacgggtacggcacgggagatttgctggtaaatgtcagcgtatatgtacccgaaacgctgagcaaggatgagaagaaagcattggaggaaatggaagaatctgataacttcaagccaaacacttcgattaaggagaaaatattcaagaagttcaagagcctgttcgactgataaaaaaatagagataataaagaaggcctcccaatatgcactaaaatatcgggaggctttcctattatctgattactggattaacaaataattcatccatatacaccggcgtatctgcctcaaaagcaactttgagatagcgggtattgacatctataccttcaaacaagactccgtcaatccaggcatcatgcttggcattctggaaggaaggagtgtctttaatagataataaacgatacgagtctccatctagtgaagcatataaatagactttcgagggcagtctaatacctcccggcctataatttaacatacgcagtaaaacgtcatggagctccatttccttttgcaaatcaacctgcagctcatgatatcccttattaaagattatccaacaaatgtctccggtgttttcctcagcaatcaagccatccaataatgccgatggagtcttttcgtcccttatcatctcaggtgtcgcaccattagccaatttatcaaggaaagaagcttcaagcaatttccaatatctcgtaccccgcttccaatccatatagttctgaaaagcacaattggaccaaataggttgtcctaactgaaaagatgacatcggattctcaatgatgccacaaaacatgaaagaaacaatattctccactcccgctgccgatgctgctgcttgctgagaaagtaagcgtgaataggcagccggaatcaaagcggaagtacggtcgttaagtctattttcccatgtgaatgtttcacaatttgcccataaagctatatccaaccgatcatgaatagtacgcagtttcttccagttttcctttaaacggaccagaggaaaatcctctcgtacacatccaatctcatcctggtatgctatgatatcaactttcaacttggctaactgcttctcgtattccgagctatcaaggtcagagttcacaataccataaggggatattaaaattttcttatccggtgtcaatgcacgcgcctgcttggtcagagcattgacggcaagcaccgcatgctccggaaatatcgggcacagacaatcctcaaccggcaaataccatccataaagcgcctcatgcgttccatatatcgacgccaattctttcatcatgtccaactgtctctgctttaccaccgggtcacgcaaattgtcatcctgatctttagcccatccggtactcataaaaactttcatccctaatcgggctgccgcatccataatggcatccaccggacttttcctatttgcaggatatacccacggcatcagtttggaaggataatatgcctttccttcattggctactgccataaaaaccaagtattccatccccatatctgataactctcgtatcttttgttcccacaaatccggatctgtattgtcaaaataccgaggattggtatacttattacgtacatcctgatatgccagatttatccatgtaccggtgattggctttaccgacacatccttgcaatggcctgctcctgagtacaacaaaaagagcagtagaactatagaaccgctaaaatttttcatctcatgcatataaatatttctaatcaatttgaatctcatccataaacaaataaggcattttaccttcacctacatgccccttgggcaaagccatactccccttgactaccagctttacataacgtgcatttacaggtgcaaatgtgacgtcatatttttcgatgcaccttttcttcacatccgcttctgccggaaatgcctcatctgccacattcacaaactgctcattgtcatccgaaataaagacttgtaatccaacggggcccataatccatgcatccatataggtcatggcatttatacttaaccggctaatttcagtctgctgcttcaagtcaataagtacagtcacatcttctcctaaaaagcctaaccaggcaccggtagagaaattatcattccccgccattccgtccaccaatgtggcagctcctccgaaagtgtaatcgggagccggctgcacctgcgtcaatgtaacaggaagcaatgtggctttattaaaggaaatagtcttccttatgcagctgtttttactatccgaacggataactgtagcacgaaaatcagcagaagagtcaatcgagacgggaacagtataccttcttgaagtttttgatggttcttttccatccaatgtatagtaaataggagcattgtctatagtgcttaaagtgactgtcatggcctttttttcaatatccggtgtgaaatcagccttgatgtcataaagatgtttggcataattccacccgtttctttgatacaaagccagcaaatttacaatccgttttgtaaaatcaccatagtctttcttctctggttttgtccactgaacttctgccaatgctgccatacggggcagcaccatatattccgcatgtgcggcagatgaaatgtattccgtccaaaggttggcttgtacgccgagtatatgttcagcctgctctgccgtgagcgcctccgtcggttcaagactatatactttttcaaccgtcaggcaaccaccgatagacaacggttcgttttcggtatcaccggtctgatagaagtcaaaatagcaatgtgtattgggagccatgactacgttatgccccattttagctgccttaattcctccggcagagccccgccaagacataaccgtggcattaggagccacatcaccctccaaaatctcatcccaaccgataatctgctttccacgggcattcaagaatttttcaatgcgctgcatgcagtaactctgcagacggtcctctgcactatgcttttcatcagctttcagtccttcggcaatgatacgcctctgacatttaggacattctttccaacgtatacgaggagcctcgtctccaccaatgtgaatgtatttggaagggaatatttctattaattcggtcatcacatcttccagaaactgcatggttttctcatttcctatgcaaagtacatcctcaaaaacaccccaatcaggacatacttcataagggcctcccgtacaccccaactcgggataagccgccaaagccgccaacatgtgtccgggtaaatctacctcaggaatgatatttatatagcgttcttcagcataccggaccacttcttttatttgttcctgtgtatagtagccaccataactcgtattatcgtattcaccacttcccagataaccgattacagtacggttgcggacagaccctacttccacaagtttcggatatttcttaatctcaatacgccatccctgatcatcggtcagatgccaatgaaaagtattcatattgtgcaatgccaataaatctatatactttttgacaaactccacagtgaagaaatggcgcgccacatcaagatgcataccacgatacacaaaacgaggttcgtctttcacgataccggtaggcatcagagccatcttttcaccgattcctataggaatggatttcctcaaagtctgaataccataaaacacacctttttcagtctgcccctctatcagaataccttttgacgaaacggagagttgatagccttccttattacttatctgcggggtcaatgccaatacaatagcattttccactttctcacctccagccattgcttttaccggcagtacgaagccaacagactgcccgatatattcggacaagaattccgcattacgtcttagctgcggattactttccggatagaccacaaccaccttatcgtccagccggaagggattgtcctgactcaacttaatctcttgcggcagagggaccaccgaataggatgccgtcccttcaccatgaacatatactgcaaattcacatgcagcaaacaatatcagtaatctctttataaacataagctgtatcaaaataaattattatactactcaaccttcttttccggtagctcccagcccatgactgtagaaataaacggaatgatattcatagccatcttacgctgcccactataattgggatgccagacagctccatagtccaacacttcattgaagagtccttcctttagtttcaacaaataaatgttcctatcattcatcccggaaacagcctcttcgtagaaagtataaactggagcaggaacagtgcaacaatagatacaaagaatgggaatctgcccataatgctggcgtaattgttttaatatctgtgtataggcctttacaaactcactcctatacggctgcggttcaagagaaaaatcgttagttcccaaattaatgactaccaaatccggacgatatgctttgaaattccattgttcagcagaaccttcgtcaaaagtttggagcatcttatccttcatcgtaatagccgaaacacgtaccgaatcaccataattacggacagccccccggccagaatgtgcaatcagactgtaatctgcatcaaaataacgtgctattatagtagagaaagaaagattacagttttccgtctccaatctgaacggttcattccggtctttcccctccgcaccatagccacacgtcagagagtttcctacaaactcgatgtgacgggtccggacttcaggctcctcctgcaaatagcccgaagctgccaaatgaaactgatagagagtggtctttccgaattcaccctccgtgcgtttctgtatgcgcaggctatggagtctacgacttactccagaaacgaagtcaatcacagtatctgtgccacaagctttcactaccgtatgcagtttgccgtcgacaaaaacattgtaatagctcgtccccgtctcggataaccttatggagagttttcctcccgcaaaacgagtctccagataagttcctacccagtcaaaagtcactgaaccatcttcttgcacttgggtacgccctacatatcgtacggcagcatcacttcctttaactgtccagcttgtattttgcgcattcgcccccggtaaaccacacaagcttgcacagaaaacaagtatccataaatgacaatatctcataaaaaaatcatttccaacgaatcactggacacgttgtttataaactctaccaaagcggtcggtcacccggacttcaatatgtgctccggcttttttaggagtagcccggaagagatgctccgtctttaccggactaatccagtcgtattcaactctctccttgtccgcacaaatagctttagcctcaggatcgtatccggtaaaacggctcatttcccccctcctcttgccatcctcataccactctaccttccacaaataatcccagttccaaacattagcaataatatccaacggataatcatcacaacttcctatgggataagtacgaaactgataatcatcaggatagccggcactcttataacgccatttcacatccgtcccatctacctcgtaaaccccataaccgaccggagtgccatccatgcaaatatcagctttccaccagataccacatacggcagccgtattatgctccatcaaactatcattaaaacagacattccagttgaaatgcgtatgtccggaaataatatgagcattatatcctttcaacaggtcgtacagtccggaagcattgctcgtctcatcttgtatcaaagtattccacttcaattccggagtaaggcttgtggggatatggacaatgacaaacacaaggctcccttcgggtacatatttcaggtcttgctccatccatgcaaaagtacgttcattgatataacctatatattgataatcgcgatttacataaaaattattgttcaacacaatataatgcgctttacctttattgaaagaatagtaggttggaccaaaataattttcaaaagtctgatatgaatattcaaaagtacgtccgccataagtcatatcatgattaccgatggtacgataaacaggaaaacctaaagaagcaaccgtatcgatgtaggacggatatagcgaaggagtatcaccgacaatatcaccacaatctattccaaaaacgtcccactcctttgaataaggttcgacaaactgatgcatatcctgcaaaaaacgaggatatgccttcacatccctttcagaagtcatttgtacatccgcttgtaccaaaaacaaatgcttctcgtcattccgggtgtttctttttagctcaaaattatactcgctacgggaaacatccactttttgaaaaaataaaggaatggtccgttccgcagcaggtacaaaaccagcaggaacagtcaaatagataaaacgggtatctcttttcttctcaagcatataatctccctgcccatcggtcaaagtacaatcaatgccgtctgtaacaactactcctggcaatcctttgccttcacacaaaacctttccataaatgtcctttccgaaagaatcacaggtatggactcccagaacaattataaaaaacaaatattgtatatatttcttcatactataaaatgtcatttaactaaagacaatgctatcttttctgattcagttccacaaatatcataagaagttacggaatatgtaccaagcttcccttgaatattccatttatatctgcatacattgttatggtcatattgtacattacctattaaaacgtcatctctatatacatgatatcccatcactcccttcttttctttcgccggtttccattcaagaatcacttcatctttattttcatcagtatatatccttaaattcgagactggcaaaggagattcacaaataggcagagtccctttctgtacatattccacatatgaattatgtattaaggggttcttcaaagcagggctataatagtggctgtaggcaaatgaaataaatccggagacatagggacgcagcaaatccatctgaagctttaaacgacccaaaggtgcaactgtccagaaacgttggtcgaacatctcgatatttgcccaaaaatggattttagggaaagaaggtatagcctttgacaaactcttaaaccattctgctaccacatcaatggtaagccaacctgctccgacacaatcttgaggagcaaaaatatctccgtccttaaaatgggcctttgataatatatactgccacatacgggaacactcttcaggggtgcctgcctcactattcatgaaaggagacagcaagaaaggcatatcttccgtatgttgatgaagaaaatccaaattcacattaagtgcatctatcagacaatccagataaaattgctttttacaacaagaattgacaacctcccaaacccaataccagccatacatcgtatcagaatacctttctttatagcaatttatcagttcttctgcaactttattccctagttccatctgtcccattatccattttggagtaagagaatcgacatcccaccagccttcattaaaatttaatcctacaaaaaccttaaatccagctcgttttgcattacgtaagcagttctccagcaaatcatcacttccgctttttatgtctggaagttttgaaggatacaccgcttccgtttttccttctttagaagtatggaccgtatgcataaaaatcaagaactccaaaccagcctccttcaaagtcttgaattcttcttgccaacggatatcattccattgtgtaaccagatgaggctgtataaatgagccttttataaataggctatctccagcattaacctgcaaacaaacagaagtgattagagataaaaatataaatatgtatttatgcattgtggtattcataactgtaaataaggaactatctctccaactctacatcttcaagatagttcccgggagtgtgttaagttaacatttgaatatattattatttataacgttgggtatcccaccagacacgtacattcatgccatcgccttgtccttggtttaaactagatgctgtagcattttctttattatcacgacgttctgcatcacaataacgtatcttcttaatgaattcaccattgcccggattgatagcaggatcatcactttgagaaattggcattaaaacggggtaaccagttcgacgacattcagcccaggcttcaatcccattaggataaagagccagccacttctgagtaatgattttctccaattttttctcatctgaatccgtattactccaagcaacattacccgtagtaagataaatctcatcattatctgtgctatataagctggcatctactccatcacgttcttctgccaacgaagcacgaataccattttcataattgttctttatatctccagcaccactccatccgcgtaaagcagcctcggctttcaactggcaaacttctgcatagttcattaccttaaatggtaatggcactacggtattgctcggggcgttaccatccattctattggcattccagtctggaaatgctttcaatccatatacacaagaattattatccggagaatttgctatgtaaccatcaacatctgcagccaataattctgcatccgtacgcccactaggaacaccctgaaactgctctcctttaaacgaaggcttgggcgctttctgattgttcttataccctaccgtctgtccaaaccaaagaggcatacgaggatcggctactgtactggactttttcagaatattctccatcgtcttactcattgtaaagcaattccagttacatatcatataaagaggatgtccccagccaccagcagcagttatcctcatatatgcattatcatcattactttccattacccctgattgcaaagctgcctctccttctgattttgccttatccgggtcgatataagaaagccgcaaagcgtaacgtaaacgaagtgagtttgcaaattttatccatttctggatattaccggcatacaccaaatcattattttctccacaaggttcttgacccgcaagattttgcttcaatatatcgacagcttccgtcaattcattgaatacatcataatatatattcttttgtacatcatatttaggagaactgcccccaagcccagcttcagaatatggaatatcaccaaaagtatctgtcatccctattgttccataagctaccgttattcttaccatctgacagtaattcgtatatgatggcgtttccgctgccatcgcttttacttctttcaaatgcttcaatgtagtataataaggagtccaatatccgggttcagcccatccatcattatatccatatctatcagaagtccatccttgaacagtatttgtgaaatattggcaatacatttgtgaatgcagattatcgcctcgctgatagggggtagcatccagattaaccccagtttcctgaacaaagggtaaaatgtatgccggactcacatttaccaatgatgacgggtcagtattcattgattcaaatctgtctgtgcacgcagagagtgcacctaatgccagacagcctattaaaaatttattatataatttcataattatccaattttagaatttgacatttaatgaaaaaccaaacgaacgtgttggaggcaatgaaccaaactcaaatgcttgagcataatcttcacgggaaaatgcagattctgcatttacaggagcatccttgtagaagtagaataaatcccgcgccaccgcagatacttttacagcctttaacggagtgttccttaaccacaatttaggcaagttccatcctaatgaaagttcacgcatctttacgtaagttccatcatacataaaagcttctgcaatacctgtagaaccaccaatgttagcatagtattcttcagctgtcacctgtttcgtgttttcatgtcccgtagactcgacaatacctttaactaccatgccatcacgtccctccagagttctttgtgagttaccggtataacaagcataattatctgtcatagaaataaagtttccgccataacgtacatcaatcagagcaccgaatgtaatatccttccattgtaaagtagtacctatggaaccggtccatttaggaagcatattaccgattaccttatccgtttctttaatgggaaaaccattgtcatcaactaaaatattcccattagcatcacgcttaaaagcgttatttgctacaatgtctccaaacttaccaccttcttcaacaaccaccgaagcaatacgggtcgatcccagagtataacgtttcacagattcgtctaattcaacacattctgtacggttcaatccccaatttaaattcacatcccatttccatgttttcgtctgtataggggtagcagaaatcattaattcatatccataacttttcatctttccagcgttaatgattttcgaagtatatcctgaagttgctggtatattaatagacaaaatttgatttatagttgaagaattgtaataagtaaaatcaattccaaaacgatttttaaataaacggaagtcaaatccaacttcataagaatttgtctcttccggtttcaaatcgcgaagcggatacgtatctggtaatttcatttcaagaacagaaccaccattaaccatactgctgaatgaactatacacatagtccaatctgtaaggactggtatcatttcctactttagcccaagaaccacgtaccttcaaataatcaacaaactctggcagtttcaccatttccgaaacaatgccactcaaacttactgaaggataaaagtaggaccaattagacgatggaagcgtagaagaccagtcattacgtcctgtaacatctacatataccatgcttttataaccaacacttacatttccaaaaacagactgaatctccttttttgaataactctcagaagccaaccttctttctccattccccatataaataaatcctggtatttggaaattacctgcatccccaaccaacccctcataagttgtattataaatagcagtacccaaattggccgttacagaaaaatctcctaatgttttattaaaattcagcatcaaatcagcattgaactcttgattagtagattggacatgagcatattgggaagttgcattagagccatcactcaaatatatggcatagacttttctcttatcattataccaatccataccaatgcgtcccgtcaaatttaaatagtcagtaatacgaagagatgcacgaatttgtcccaacaaacgattgcgttgattggtatttccattttcaggcataattaatccataaggattactataattttctgctggccctgaccagttaatgaccttattattactgttaataatatttgtactcagatctgacaaacgaataccacgaggcaaattaacaagctgtgtcattgtaccatattcaccttgggcaggagcattgtttaccttctcccgcataaaatttatcttggccccaatggttaaaaatttattcttgaattcagtattcaaatcataatattgacggtttatagagtgattcggagtaataccatcatttctcgaatctgtaaatgaaaatctacccgtaaggttttcacttcctgcagaagctgttactgtattggaatactgaacaccggtatcgtaaaatgcttttatgtaatcttcctgaggcagtaaagcataatcaccataattagtatcaccatatattgcattacgccagttggttaccatctgcccttccattttaggcccccaacttcctctggctgcagtactaaaattacctccagaaccctggccataaatattctgatagtcataagtattataaacggaactaaactcaaaattaccattatattctatttccaaaggttgcccttgtttaccttttttagtagttacaataattgcaccactctgagctctggaaccatacagtgctgcagcatttgctcctttcaatacagaaatactctctatatcttccggattaatttgcgaggcagctccatatctatccacaccaccatactcattggcagcttcctgaactccatcattaatgggcacaccatccaccacccacaaaggttggttattaccgctaagagaatttaggccacgcataataatacgggttgaccctcccatccccgtaccagattgagcaatttgcacaccagctattttaccttgcagcatgttagcaacactaatagatttgttctctatcaaagcatccgtcttcacttcctgcatagcatatcccaatgctttcttctcgcgctttatacctaaagctgtcaccacaacctcattcaattgttctgcttcaggctccattgtaatacgtaaatcagatttctcccccacttgtataacaacatttttatagccaataaaagaaatgattaaagtagcatcttgattgggtaaagctaaactaaaaaatccatccgaattagagattgttccggctgtagttcctttcactacgatgttagctccaggaataggttctcccatttcatctaaaatagttccttttaccaccttcttgtcctgctgctggacatcaagcgctttgtttagtggcgtatctgcataagcattaataccaccaatgcaaaataatccacagaaaaggattgttacagtttttttcaccatcctttcatgtctcaaattgtttttcataagctcattagtttaattaatagttccaatatatcatcactttttacttaggtcttctaaaacttgccaacattggtacaatcctcttggcacatgaaaacatcctttccatttaccacctttcaatggtaataatacttctcccctacgattcaaatatccaaaccattccggatattcagaatctttgaaatgactccaagtataatcatgcactttttcaaaccattccaagcatttttcatcaccagtcaactgataacctttcaacatggaaatcaatgtctcgatatgaacccaccacaacttctgatcccactccagctgctgtggagggaatcccttgcggtccataaaataaaaaataccaccatattctttgtcccaaccatattcggccatcgtcaaggtaatatccttggcttttttaaccaactcaggacgatttaagcgcttacctaaatccataataaaccacatggcttcaatatcatgcccaggagtaacctgacgtccttcaaacgaatcagaaagttttccatcagtaagaacattttccacaataatcccccctaattccggacgataaaaaacttccatcacttcatgaatgcaagtatcgattgtctccattaaaaaattctcactcaaaagatgttcgatttctaaagacagattacaaagaatcattggcagagcaaacccctttagattacgagttcccaaatgaagtttattccatttacctttagggttacccactttcgataatacaatgttaaaagttcttttggcaatatctgcatattcctggttgccagtagccagacttagttgtccaaaagccattgtagcaaaagtgtaggagaaaatattataaggctccaccaaaggattcccattccgatctaaagaaaaataccaattatagttaccatcatgcccatattttttcaagaattcacctccttgaatcgcacaatcaagccattctttacgtttttccactttattgtaaagcattgaaaacatccaaacttggcggccttgcaaccagatgaatttatccgtatcaaatacttcaccatcacgattcagacaagtatagtaaccgccccattcaagatcttgcgaatgagataaccaaaaagggagtacactatcgaaaagctcacttttgtattgctttgctaattgtttaaattccataatttataatttaaataaggtcaattatttttccatccaataacgttctatttcttccaaagatttaccagtagtctcaggaatcaatttccacacaatcagaatataaggcacacacattacagcaaacaaaaggaatgttccagcaggagtaaggttctgaagcatccacggcgtaagctgtccaacaagataagttcctacccacaaagcaaatccagcaatagacatagctattccacgaacacggatagggtacatttccgagagcagcacaaaaatgactgcacaaatagagatagcacaacaaaaaacataaaacaagaaaaagaataacaagaaaccgtttggtaaatcaaaagtcctcgcaaaacggaaataaaatcctattaacaacaaggaaataaccataccagaaactccataatatacaagctttttgcggcctactttatcaataataaagaccgcaatgattgtagttactgcattaacgatacctaccaatacttggctgaacaaagcatctcctcctgacaaacccgcctcttcaaaaatagaaggcccataataaagaacagcatttactcccataaattgcccaaggatagcaatagcagcacctatcaatacagctttagagattcccggctgtaatagaagcttccattcggacttggactctgattgaataacagattttgtttcttgcagttgtcctgcagcctcatgctcagagagatatattttccggaaaatacttcgcgccaaaccatcgcgccctttcaaaaccaaccaacgaggactttctggaatgaaaaagataataaagaaaaataataatgatggaatactggaaaaacccaacatacctctccacacttccgaaacaaaaattctatgtacccaatcagcacctaaggtaatcccgctttgagaaaaatgaagtaactggaagtttgccagatatgcacctaaaaatccgatagtaacagccagttggtacaaagaaaccaaccttcctcgatattgggctattgagacttccgatatatataatggagacacaatagaaacaattccgataccaattcctcccaatatacgtgcaaaaaccaactgctcaaaagaatcaatgaaggcgcacccgatacccgacaccgaaaaaaagacagcagcaattaacatcgtcatcttacggccccacatgtcactcagtttacccgcaaacagtacaccaattatagaaccaattaaagcacatcccacaaaccagcccacttgaatctcatccaatccgaattgggctgtaacctgagatatagtaccggaaatgaccgcggcatcatatccaaacaagaaaccgcctatagcagccacaacagacaagaacgtcaaataagaaaaatttacatctgatttcatacctattacatctttatttactacctgatttcaaaatattctttatatctatcatataaatgccctgcttgcaaataggctgattgaggactcatgaaatgagaaaattcaaaagtaatagccttgtcatagccagcacgtttagccgcttccaatttcatccggagtttatcaaacttaatgggtaagaaacgaataggcatatcccgatcaaatgtctctgcattagtccaacattgcataccgtacttatccgccaaatgcttatttactgtaaaaaatgcatctaattcatcgtaatcgatatgtccgtcctgaaaagcacaagcatctactacatcatgaatgccatcaaatatttcattccactctctttcatgctcttctacagaaacagcatctgctttcgttatcttatctccacttaccattaccgctttcttcccatcaatccatggagatataaaagtaggtaaaccaccagagacatctttacattgcttacccatggaataaaatgcatcaatggctcctttggtcttacgactaatctcaccgctaatgtaccatccaccaaaacttttatagcgttcaccatactgatgccaaacctcatcaataacatatttattatcttcaatttcccaacttaaatcaccagtgtcccaataacgtccggaatcatacaaaccgaaataaaatttcatatcatatttagctgccaaactcaaaaacatatctactaaatcaatggaaggcatataacaccctttcttcagtaaatacttggaaggataagtaataaatttccgatatccagaacgtatcaggataactgcatcaataccaatccctttcatatgttgaaagtccaaatcccattctttcattccccaattttgatgaggaatatcatgcgaaatttcatctagaaaagttccggttattttcaacccattattctttggaacaatcaaggtatctcccaagtcagttcctgatataggaaataggcacccctctttgtttgatgcagtactcaaaaaggaaggagctgcaaacagtgaagctccggctaatactgactttttcaagaaatctcttcggtcatttgttttcatttgttgtaggtctttcttagtattcttctatttaatctgccacaaatatagatatatttattaattagacaatatttaataaaagattttattatattaaactcagtaattaacctttttaattaatatgagataaataaataataaaataaaggggaatatattataaaaccacatgcaaataagagtagttaccaaataattttaatatctttggcaaggatacacaaagcaaccattatgaagcaagaattattaaaagaaatagaaatggggagcaaaaatgctctgctaaaaaagaaaatcattacacattatatatataatggtagttccactattactgatttatccaaagagctggatttaagtgtgcctacagtaaccaaatttatcagcgaaatgtgcgatgatggctatattaatgattacggaaagctagaaactagtggaggacgtcatcccagcctctatggactcaatcctaaatccggttactttataggagtagacatcaaaaagtttgccattaacattggacttattaatttcaagggtgatatggtagaactgaaaatgaatatcccatataagtttgaaaatacccaggaagccttggagaaactatgtaaactcatcagtaattttacaaagaaagcaggaatcaatccagaaaaggtattaaacatttgtatcaatatatcagggcgagttaatcctgaatcaggttacagcttcagcatgtttaacttttccgaacttccgttagcagaagtattagccaagaaaatcggatattccgtttgtatagataatgacactcgtgccatgacttatggagaatatatgcaaggatgtgtcaaaggagaaaagaatatcatctttgtaaatataagttggggacttggcattggaatcattatagatggaaaagtttataccggtaaatctggattttctggagaattcggacatgtcaatgtattcgacaatgagattctatgccactgtggcaaaaaaggatgcttggaaacagaagcatccggttctgctttgcatcgtattttgttggaacgtatcaacaacggagaatgttccatattatccagtcgtatagccactaaagaagacccactcacactggacgaaattattgcagcagtaaaccaagaagatttactctgtattgaaattgtggaagaaattggccaaaagttaggaaaacaaattgcaggattaatcaatctattcaatcctgaactggtaattataggaggaacactgtcattgactggggattacattacacagcctataaaaaccgctgtgagaaaatattctctgaatctagtaaacaaagattcggttattataacttccaaactaaaagacaaggcgggtattgtaggggcatgtatgcttgcacgaagcaggatgtttgagagctaaagttccaacatccgcttcataaaagcctttattccttctgcatcagaagtctgaggagcccacgaagccaaatcctctgagggtagaggctgatatgggccttttttaatttcaaaaataacggtacctgactccaaggcaataatactatgccatgtattagaaggaatttccagaccatatttaccttccgaaggattgaggcataccttatctgttacattaccggcatcatcataaaaaaatgccagcagactcccacgcaaaaccagataagtttcttccttatctgtatgacggtgaggaggaagataagttcccggttccaaagcattcagcaaccgatgaataggagcatccatagacgcatgaaaattataattcatacgtaaacgggagttctccttagcttgtgaagtaacggtatccagcagctcttctgttatcagcttcatcataacttcagcaattgggcaaacttggcaggaagttctgctttgcccgcttcaatagacaaactttttccttcattatctactaatatagcagcctcctgcgaggaagccaatgaggtaacttccgacacattaccggcaacaaacaaacatccggaaaaaagaggagtaatcacctttcgggtatgccctttccattttacaaacacagcctgcatcgggcaatatgtggtatatcccgcagcattcaaacgctgcatcaacttatgttcagacttgggtgctgtgtacaatgcatgccagcacatcatatcattatccgtcatcatattgtttgctttttccatccctttaataaatcttttacaaataatatccatcccacactgccgacacctgccaagaacatgaagccgatcaaaatcatcaatttattgggctttgcaggcttcaaaggtaccgtagccggctggacaaccgtatataccggtgtaatctcctgcaccttagctcttgccatctgcaattgttgagatataatccgcaaatcgaaatgttcgcgcattttaaaacgaaaagttcatttcacaaaacgaaatgtataaattgaagcactctttatcccatttgagcaggtcatccataagctaaaaataacagataaatcacttgcaaatatcagcaaaaatcactatctttacatagttaaattgaggttgtttaccccaaaatcagtttagttttgtattcccctaccctatcaatattctaaaaaaaatcgaccggcttcgccggtatttgaataccttttaaacgggattcggaaaccatccgaatcccgttctttcgttttagtcgcttcgctccacgctttggcgctttgcgcttacgccacctcgcgtatcgccttatacgctgccacgctttgcgcccgcacgattttgccgcggaaggccagacgcgagccgatatgcgcatacgtatacgaagcaccgtaactcgcattcgcattcgacacaccgccactcgcgtccgcattgttgtacccgcgatagaccacacggactgtggcggtgcttatccagtatatgtcggtatagtaggtagaagatgatccgttcaaattacctaccggaaccatgtccatatacttgccgtgcgccacgcctgtaatccactggccgctgtccttcttgccctgcaccatgcggatactgccgtcaggcatccagatgcgccatttgcccacgttgccgctgtcgttcggcagatccacgccgtccatcatgtcatacttgttgccgtagatgtcctcatagcccaggcagcagatattgttcacctgcaccacagtcgcctgtccgtattcgtcacggctcttataccaggcaaactggtgcaccagatcttcaatcagcgaattcgtgattttgttgttgatggcatacgcttcatcgtagccgatggtgtctgtcatcccgtgttctgccgttccacccgttgtccggttattgttatgctgaccggcaccgcattgttcctgcatgtccctacgcccgtactttgcatagctcaggttcgcgatgcggctgtgcatcagcgagtctatctgctgcatgccacgctgctggctgtaatagtggaagtccgtccacgtcatgctggcagtggtcgagccgccggttatgcaggcacgcaacttgctgcccaccacagaactgcccacaacggcacacagatgctcctcattggccacccaatccggttccatgtcctctatcttgtcgctgttgctcagtaccacatggtcaaactcagccgtgttcaggatggagaaatgcagagccgtcgcacgatccggaacgtctgctatcagatacatgccggcttcaaatttcaaaccgatggtcggcaccacgatgctcttcaggatgtttcctgcagcatccacaaacacactgccgataagccccgtgccgggaacgctcggaaagcggacacgtctgtagccggatacatccaccttacataccgaataggccttgtcagtcgtataggattccatcaacgtaggctttccgctcatgatcttgcgttcacccagccatccgccctgcgtttccttgatgtcatccagcgtcagtatagttgcctccggaacaggaggcatttcgtcctccgggtagctgctgtagcaggcgtacttcttgttgttcagataatcgttgatacccttgctccagtagaacggttcatacatcatccagtcaccctcgctgccgtccagcttcgccaccgtgcagtcgttcatatcctccgcatcggcatagaagttcgagctttcgtcatgcagggggaaataggtcatctccccgtccgggttgttcacatccacctgctgtccggctatctccactttccggctcgtaggcatcctggtcaccttggccaatacgcggtggcgcttggacaggatggcattcacatgcccgctcattttgtacgcattcccgaacttgtatccggtcttgttgtccaggtttgaaatattggcatcgtcggccacgctgtcgtcaaactcgatcatcgtatagggcggctgcttgatggtcagttccggataacgggcggcatacttctccagttcctcatcagccagatacttcgtcagggtcagcttgcccctcagtcccgaatgccggtcatccacggcacccgtctgcgtatacgttccgtagtcgtaatacttcttcagcagggttccgtcgtcttcccgatctatctccagcacaaagcgctccagcttgccgctgccgttctgcttcgcctggtgaagacgttccagcatggcaaacccgtcaatgccggggcagttggtgtagcggtagccccgcacattattgatgccttccagtatcaggccactgtcggacagcttggtcagatattccaggaacagttcctcaatcgtgtccggcaggcataactgcacaacgggcgcaccggtggccagtttcacgcgggtcagtcccgtacctcttacgtccagtttcttcagccgcccctgccagctcaaatccaaggtggccacgtttccgttgtccccgttccgggcaagcaggttattccgcatgttcacttcttccagaagcagcatcccgttcgtcgaggccatgaacgagccgttccggtatccgctggctttctccacgctcatgtccagttttaccagtgaggtcagcagaccgaagttgaacccgatggcgaacgcatcttcatgccacaccagttccttgattttggctgcaccgataatcttcagcgggtcattttcgccgaacgaacgggtcagctgcagggaatggagcacgtctgcatccaccacaccgctgtcggcctgtacgccattgctggtagataactgcacacggtacgggatggtcagtcggtactgcatcggtttcagtttataagccttgtccagcgatgccgtactctggtagaactgggcacccagcgtagatacatagccgtactccacctgcttcaggtcgtaccggcgctgaatgaaatagttccggtgcgctttcagcgaacccttcagaccgtagatctgcggataggtctgtttcgcaccgtccgcgcccaccggcatttcgttcaggaacgggtagatgtatttgaagataccggacttgttgtacaggcgtgagcaccacttcttcatctgttcggtgtcaaaatggtcaacggccttctgaatactgaaggcgctcatgaagctggtaccgccgttcacgcccttggtcatcacttcctccagcagattgcccatgttgcccagtatcaggttccacagccagctgttgtgtccctgcatcacgtaggcaccgtcgcgcttcgtctgccggttgtcgtcatacttcccggtcaggaacgacttgttgtccgaacccagctggcagtccccgtcgtaataggttatccaccacatcacaccgtcccacgtccgcaccagcatgttttttgccagctggtccacgcccaggttgaactgcacatacaggtagtaggcagccaggttgggcaggttgaaatacttcccggcttccttcctgaaggtcgggctcacccatttcgcagtcgggaacctgttgccatcatcctcatagtccaccccgtcaaacgtgtgcgactccctgttataggtcagattcttgccggcaggcgtttccttcacgcatctgtacaggaagcccatcatgcggtccagggccttgtacatcttgtcatatttgtcaccggtgcccaagtgttccttgatgttcggttcttcttcggcatcgccaccgccgtcgttccagaacacgtctttcgggtggttgaactcgaaaccgccgtcaaagttgaaatccatgaagtccgtatggtcgggttccgtggacggcagccaccggaacaggcacaggtcattcgagttgttcagcgtctcgatgcagatgggcaggtattccttcggctggtcgccgtttgcctgcaggtagttcagggtgtcgccggttccccactgctcgccgccgatagtcttgtcctggccgaatatcggataggagtcggacttctcgttgttcatgttatactggccgtaataggtcagatcctcatccacactcctggccacaaacaggtcacagggcaagccgtcaatggccgagcgtatatcttccttgcacgtatctgcatggtcggcggcatactgttgggcaggggtcagaatgcccatttccttcatgccgtcatgaatgaacttcgcaccgcccgtgttggtcgtcatggaggagtctgaaaagtcacatttcgcacaggcaagttttgcgcccaccgagttgccccgcagccggaacaggttcttcttgccctccgtagctgtcgggttgctctgctgcccgttgccgtctatctcgccgtaggtcatccgtgccgtgtaaccgctggctgtcttctggaagtagaagcgcaggttcttgcgggcatagttcaccgagctggtaccctgaatacgcagataaatgtcacgggctatccagtccagcgcccggttctcgccgttgtagaatctcacttcccggcacagcttgttggccttcttgttgttcagctgggccagcgcatccatcacgttcagcgtgtcgctctcgctcggcacctcactgcccacgctgcccgtacctatcagtaccaggatcgagttccggcgtttcttcatcagtcccatcagcttctccatgctcaccgtgtccccctcgttcagcacgcggttgtcctcatccagcgaccgcacgcccggctccccgtcggcatcctccaggtggttgcggtccacgatgtagttgttcagcacctcgtccgaggtcagcgccttgttatatatgcgcacgctcttcacgttcaggtcggcacccgttgacttgaactccagctggctctggatgttgaagttcaccttgtccagccatttggaagctgccgattcttcaccgttcacataaaagccgatcagcgtgcgctgttcgttcgtctgcacgttcgggtagaacacgtaggtaatgcggatgttcgtaccaggctggaatttcgtacccaccgagtcctcatagcgcagcacctgcccagcatccatcgcctcggtcaccacaccggtcaggaacttggcctcttccggggtcacaatcagcccgtaccggttgccgttgtccagctgtcccaggcaagtaatcagttccgcgttcgtgtccgtcacgttcgccgtgctgtattctatttccagcgtcatgcccacgtcacggatggcaaatccctcgggtttgtccgcctcgttgaagggacgataaccgccgtcggcggtcagggtcatgcctgcaccgccggccagcagcaggcggtccttgtgccagccgctacctgccccgtattcgttcacgctccacagcacgtcccggaactccatccgcttgtcaccgctcacccagcttgccgggttgttttccgtgttgctgcgcccgaaggcgtcaaacgtacacacggcatccggtgccagcgtagcttcaatgtcggggtgcgatgtcgtgttcaccttcacctcaagcacggcatcaccgcacgacacgcggtagtccagcggttccacatttacgttcgtccgcccgtagcttccggtatcaccgcgctgcagcaggtcttccttcaccacactgccctggttcgttactttcacgcgggccgtgtacgcatcgcggtcataaccggcatacgaaaaactccatgccgtgaactgctctgcctccagcaccgggcgtttccagtcgcgctggaaccctgccgcacggtggctgaacatcatgccggcataggccgtcacaccgccgcctgccttcagcagcgtaatgtaatgcacctggctcaccacaccggagttctcatgctgtgcgtaggcttccaccacgttcgtcccttcctgcatctgggtcagcgggatggtcacgttcttctgctgcacaccgctgccggccgaaaggccaagggtaaaggcctgtccgccgttcacacggtagtagatgttcttttcgccgctcgtacccttggctgtaaaggggatgttcacgtcgttccggtatccgccgtcggccagcccgttgcccaccgagtaggtcgtctccagcgtcatggccaccatggtcaccttggccgtggctgtcttcatcagcgtgccgccctggtaggtagcctgcgcctccacctgcacggtataggcggtggcatccttcaggtagggcgatgcgtcaaaggtgtagctctgtccggctgtcacacccacaaattccgcatcctgaaactcactgatcacggtcgaaccgcgtttcacaatcacgcgggctttcaggtcgctgtagccgtccaccgtaccgccaccggcagtaccaacgcccacggagtatttcaccacaaagccgcttcccagtgccaggtactgctgcgagggaagtcccgccccgccgctgtccgtcaggtcaatgttcaccaccaccttgtcgtcgtcggtgtacttcgagaagcgcacctccttcgagctctcgccgccctggttgtccttctgcttcacggtcatcacatactgggtgccgtcctcgctgtcctgcacatccacgtccgtcaccgtacccaccatcgcatcgaacaccgttccggatgtagggggtttcgtctcgccgcccaccagttcctcggtaggggtacggtttgacagttccttcttcagaaacgcttcgacatcgtccccggcataggcatgataggtgccgtccggctgtttctggttccacggtgtttcaagattcatcggatgttcagtcgcattgatgattccgcttattttcctttttgccataatactgtccttttataataatcattcatttatcagttttactgctaccgttccatgcgtccgacccgttccacggctcgtcgcctttccagtatccaagtccgaaacagctgctgattgcggaccataccagccttgccccggcatagacagccgacagggcacgttttcccacatacgcagccgttatttccttaccgcctatggttatcatcgtcaatcctcctcataaatcagatacagcgtattcgcatccttgtccggcagtgcttcgtaagcatccccgctcatcacctcatgccggtaggccagcagtctcaggcggccttctgttccggtatatacggcatcgcccaataggtaaagcttgtccggcaatatgcctgaccggtccgcactcatgaacatgccggcaggggacacacccgccacgtcccagtccccgtacagggtggagtccatgtggtaggcgaatttcccggcaccggccacatacaccacgctgccacccggcttggtacacttgtcaggtaaaacgtttccggtttccatccatgaggaaaagcgtgcggtagctccgccgacggctgctgccgtagtctgttccaccttggctgcggcattttctgccttggctgccgcttcgttggccttggttgcggcttccgtggcggcctgggtcttttcctccagtccggctacggctccttccgctttcttggcggcagcctcggcacgggcggcggcatcgctcgcaggcttccctatcagctccagaggtacgttcaccatctttccgtccttctcgccgggcagtgatttcacaccgttcagcgaggtaacagtttccaaatcctccacaccggtagaggactggagcacacggtccagcacttcctgaaccagttcttcttgcgtcatttctgccataaatctattcatctatcaattttacgatctgtgaataacatcctggggttagcccgattacagactcttttataagtatagcatcctcagcactgatggataaatccccgtttgcctgtatgagacgcatgcacaattcatacgaatggattttacggctgctatccttattagaatcaccggatgatcgagcaccttccccattaaaaaggcattgggctataatatctgtcattagctggacttttccaccgactatgaggtcattccccctataatccttaaacgtcttgttaaaattcaccttcataactattcatttttatgacacgttaatgataattccattctgtacttctactgtttttcctttgaatcgcccagaccagccattttgaggaagcattttatcagcttgtaccacacccccactcaccataatgtttccggaatgcaccaacacatcgccatcgaaatatcctgctgaaaatgtaaatttgtcagggtaagtaggcttatcacggcaacttccataaataccggctccaccaaatggagcaatacccatgattgcattgctaaaattgtttgccttggcatatatgcaggtatctccggtccaatagccgtcataccccaatcgaatttcagcatccccgttgctccaaagcatgcaattcctttcaactgtaaatgttcctacctttcctccgtcttcaacaaatatttttccatatacagatgcattccggcattccatgctgccgtcttccagtattttaaagtttccattagccgttaccaatccctccaactgtatatggtcggcagtcagtttgattttgctcacggtatttccatactcatcctcttcctccacgcttaccccgataagggcaatctttcctgtattgtcctgcgcatacagaccggaaccttcaggctttataacaaggcctgtttcttttagcgcattaccatctttatcaaagaccgctgccgaaatcttcaccagccggtcgctctgctcgaacagtgtcctgtacttataggccagtgcgtctgccttgttggtagagaataccagcagtgatatgtaaatcacgcccgtaaacgacagcttgaagtcgcctgttccgttccatagaccatccagcgtgaacatcttctcaccgcccacgggcaggtcttcttcatggccgaacaggttgaagttctcaaatccggtcttgtcagcgttcacaaattcgattttcagccttccggctttgataactcggtaactgaacgacagatacaccacgccaggcacccgttcgccctggctgttcgtctgccggtactccggtaccagccggaagtcctccagtttctgcatgatataactgttccggatataggcataaggcaccttgccgtcagttcgtatctcggcatgtccgtccggcttcgttccgtaaggaccgccgttcgcccaaatccagcgtccgcccagcgtgaacagcgtagccttgctgcccgtcttccatttgtccatgccgtcggcaaaactgctgttgtccaaatagctctgttcttcgcgtatctccttgcgcaagctttctacagccgaatggattttcccctcggttatctcaaaccgcgtcaggatgtcctcaccggtcatcagcacaaacgtacccttcagccacacgttgtcagcatacaggccgtttcccttcggttggttgtctgccggaaaagcgctgctcctgatgccgtccagcttgcccagccggcagcgcaggcagccgttgaagttcttggccttcaccccatccaggatgtcgatacggggctgtccgtcctccgtggccgcaatggatataaggttctgccggagcgggttttcggtgttgcccatcagcacgcactcatcgcctgcctccggcttcaccccgccaaactcgctaaccggaaccatcaccccgccggctatcaccgaggccacctccacccagtaggatttcagctttgccccgcctgtaacggcacagcgcatcaggtcatgggccacaaagcccgattcctgctcaaacacgatgcggtagttgtcgccctgcttcaccacgtccttgatcttgccgttggcggctgacaccaccaactggccgcacacgctgcgcacctgctcaatcagcagttccagcgccaccaggctctgccgggcagtcactttgtccaccgtcaggttcgtcagtcccgtcagctggtcaatccacagctgccagccctcaccggtcagcccgtccacaaactccgtgctgcgcagcagttcgcggatcacggcagtcaggtactcggcattgccctcaccgtccacgctgccgcagggtttgccgccggcagcctcgccaaaggtcacacccttcaggaagcggatgggctctttggctgtgtccggctggttcttgctcagaaactctttctggctgcgccgggcggaaaacaggttgttgtccgtgggcagcgtcttgtcccagcttcgtatgatgtccggaagggcagcgccatccgtctttgattttgtatagcttttcaacgcaccgatgctgtccgtcaccttgtcgaacttgcccacctgcagcgcatcgcttatctcgatgtccatctgcccgggttcgttcaccttgcggctgattttggtgatacggctctgccggtagcctttttccgggaaatacttccggctctccagcttcacccgtctgcccacaaacaggtcaatgccgtgctcctccatgtacaccgggtctgtcggagctttgtaggcggcaatgtccagccagtggtcttggttatattcctctaccgctaccgcaaactcctcttcggccagccggtaatactcatccggcatccggatgttccacagaatataggtgtcgcctgctcggggcaccagcttgccgcccggcagctgggtgccgtcatcgtagggccagatggtaatcagttcaaattccctcgccgcactgtcgtagttcacctcaaagtagtggtcatcgctttctcccagtccggccaggtcgcccgtctggaacgacacgcgcttggtctcgccggccagctcgtacaggttggggtcaaagttcagccccccgtcccggaagtaataaatggtgaatttcttcccttcatcgtccgtcacctcctcgctgcgtaccgagctcaccgtaccgacccgacgggggaagatgccgctgaaggcatcctgctcgtaatggtcatagatgccgtattcatccacgccctgctcgatgtacttctttccgccgggaagcatcagacgggggctgccatatttctccgcatcgatgttgcgggtcgaacctaccgggaacaggcgggtgtagaacttggccgtgttgctcgtgtctctttccagcgaggtcagccccttgccgtaccccagggcaatttcttccccgtgttcgcagcggcacacgttcaccgtctgcccctcaatccaccattccaccttgccgccggccttttccgcgatggctttcagtgcttcgtcgcagtacataccctcgtagtctatcgtgatcagctccgcaccttccaccgtacccaccttccagtcggtaatgtggcccatgccgtcattgatggctttcaccaccagcgccacatgctcacggggcgtggccgtcagggtaaacagggggttcgtgtccccgtccgtcgtctccagcaccaggaaccgcttgatcaggctctccacgccgtacagcttcaggtcatagtcccactcaccatcgttcacctgcttcggcgtgtagcgttccgtcagccagtaccgttcacccagatagtccgtgtagtcgttcacgtccagaggcaggaagtcataatagctgaacgacagggaaagcacattgtcaccctgcacctccttgctttgcgtcgagctgtcattcacagccacgtccgcacgcttggtcccggctttgtcatatatcgttagaagcatattctaatagcgtttgaattgtcgtgcaagcgagtgtcaaagagcttgctcgatttgaccgagcgcagccgacaatcagcttgctgaatggttatataatcggtttcggttcccggaactttacccggaactttccggcatgcacgccttccgtccacagataggtcagcggggtgaacttcgtgcagtcggcatacttcacccgcagctgcagatccagctgggggaaacggatctccagccagccgtccttcccttgcttcaggaaattcacaaaggcaaagtactgcttcatccagcctgcctgggtcttgttgtaaagcgcaaaatgcagcgtcacgtcacgcgcttcattccgtggggtcagcacggggctgtatttttccccgtgctcttcccgtatgtccacagccgtatccttcttggccttgctcggggtcaggatggccgtcaggttctccatgcccccgcgccggtcttccaccaggaacacgccgtattccgtccagatgtccgtgccgttcaccagcaccagtccgctcagtatattgcccatatcacttcacttttagtccgtcacgtatcattttctttatcacttccttcagctcgcccaggtggccggcgctcacaccggtattctcggctatccgggccaggtgcccttcggccgtgtccatcttttccgccacactttccagccggtcgtccatgctgctccagtgctgcagcccgccggtgaacatgccctccagcttcgtcccctggtcctgcgtcatggccgtaaagccgcccgctttcgcactctggctggtaccgtcggcttcggtcttgtcgtagcccgtggctgccgccaggttgtcacgcagggcaagggcttcgtcaacatactgcatgtactcttcggtcagcgcgttccgttccgcctcggtcagttcgttgtcctccatggccttgccgaacttctcccaccagcctttcagtttttcgctgtacatctcaccgatcttgttgcttagcatcgcccgcatgaagtactcggatatatcctctgcagcatccttcgcgccatacttcatgttcatcagattatcgatgaagctgctatacattccgtcaaacgaaatgcccgtcagcccttcatacagctggtcggtcagttcctccagcttgccggcctgcgctatgtagtcatccagtttctcggtcagtcgcccgccgtaaccgcccttgccggtgttctgtatctgcgtccacatgtccacgttgctgcgcagcgccttcatctcctccgggctcaggctccacaggttcccgtcccactgtcggccaatctgtccgctcagtttgtctatctgtgcctggctgaagccgccccagtagtagttccagctgtggtgacttccgctgtagcgtgcctgttccttcgctatctgcagatagtttgcattcgtttctttctggtatttgtaagcatcccggtaagcttccaccgatttagtccccttgctcgccttgatggtatcggtcaagtcctcgatggaggtctgcagtttctcgttccggtccgtaagacggtctatagccgcctgcacttccttggcgtttccgccgatgccgaacagcttgttgaaacctccgaaagacaccgtgttcagcagtcctccgattcctttcacaagtgaaccgcctatctgtttgaacaggtccccgctgaggatattgtcgagtattccggttatcgcattgaaaatggtgtctatcaatgatgaaataatcgggccaataccgtctttcagcaaatccagtatggacagaatggccgatatgatctgcccgatgactccggcacttgacagggtctcggacatctgactgatggcatcaccgaccttgcctccgatattcagttttgaaagaccggtaagcatgttctggattccttcaaatgatccctgcaaggttccgctcgcaaagccgtgcaacccgttggataccatgttcaacccgtcaaccgtgtcctgggaggcacttttcacctccccggcaagcgccttcatttcagaggtggcgttcaggtattcttcgtcagctgaagcgctggacgattgggccatttgaagagcgattttggtacgttctatttctgcctggttaccgctttcaagagccttgttgtaatcggtctgcgctgcttttaaccgggcgaatgccgcttcctgctgcagttccgcattttgcacgcgtgttacggcattccccaaagcgtgcatctgcgtttgcagccgggcaaaatccaatgtgccgttgccaccggggagcatgctttgaatacgttcaatggcatcgtaaacaacctgctggtccgctgctcctgattttttgaactcatccgtcttgacatactgcttaagttcgccgagcaggttcttcatctggtctgcaagcagaccggtcaaatccccgaacgctgctccccagtctatcttctgggtaagggcttccatgtccactttgtgcacagccgcatcacgctgcttctccaaagtcagcctttcgccctgggactgtgccttgcggattttctcggcatattcttcagcgatggccagtttctgctgctggaaggtaccgtattccttcagatagtcacgcatggcttccgcctcttccctgtacacgtccgtctccgcttttttccgggactcggtgtttgaggcacgggctttttcaagtgcatcctgttgctcacgggtaagtccgttatctccggtggatatgccggcttccttgttctcacgcttccagtcggcttcctgccggttaatttcttcttttctcgcgttatagtcatattcgatttgtgccagtttcttttcggtaccggcttgcatgcggtctatctcttccttccggttctcggcctgcagggcggcaagatccttcgccagcctgcgctctgtggccagccgttgcttggcttccgcttccggattcttcccggactgttcggggtcggtatgtccgccgatatttccttttttggctgcttctgcggctttccttacctcttcctccgcttttttcagataaccgtcgcgtttgttttcggcatttttcaacagtatgtcataagcttcctgatcatgtttcttaatggcagcctgtgcgtcatagaactgcccggattctgccatgcttgactgcatgatatattgtccccatttcccgaaaaagcccatggcgctttccgcctcttccggtttctgcgccttgattttattcacctcttcatcggcttctgcagctttttttacaaggttctggacattggcctggtgcagcagaacctgtacatagtcctcgctcttttggataagggtatcataccattcggaaagtgttttataatacccgaaagattccccgtacttgcggttcagttcctccaccttggccttttcctgttccttgctgccggtgaagttctttatttcattgataaccgatttcagttcaaagcgggtacgcaccatctgggcacgtccgtccttctctatctcggtcatttccttcagcgatatgttgaattcatccacgccttttttggcactgaacaggtttttcgtccaatcccagatttcgtcaccgtacattaccagcagcatgatgccggtggtcatggccgtctgccaggaaaaaagtgaggaaagaacctgcttccataccggtgtgcctttcttgccggacttctgcagctcatcgtattctttccgggcacgggccagttcgtccgtaaaaatcggcaggttgttggatatggccaggaagaacatctgcggtcccatggccaaggaaggcatttcacgcgccatctgctggatgctgttgtgaagaccattgaactgtcgctgtgcattgggtacatctgcaggggtgacctgcacggattccgattcctcctgcagcagtttcaacttgccgcgcaattcatcaagctgcttctccagtgcatggatctgcgcgatattggcactctggtccagatttggggaagccgtctcaccggcaaggcgcagcctttccagttcagcctccaacaatctgacggtattacgcagttccagcgcctcacgctcggctttattcataccgggcgtaaggttatccttcatcaaaaattcaacttctacaggtttgctcattccagtttgctttgaaaaaatcctattatatcgttcgcctcatcctcggcgctgcgctccgggtggcggtcacacttaccgctgcccctcttctgccgcacataccgcggcgcgtcgctcagcatcagtatcagtgtctggtagttcacaccgtccagaatgtagtccacactccagcccgttgccgatgctatctgccacacgaagccgaaagggctatgggaaccctcataccggatccttaactccccatccttgcctggctcagtctcggagtcatcgggttcgcccgcgccgccgagctgataatacgcataaaatccttcgtgcccatcagacgctcgaatgtccggaacatagccgtcagatagcgccactccacaaagttccgaagcacccatgccgtcaccccaatgcctacatgtcgcgacacatagccccggcacaccgtataggccagcagacggctcacagccttgccatgttccgctacaaagcttagttcctcggtcttgtccttcggctgccacccgggttcaacacccatcttcaggtattccctcgccagcagaatctgcccgcgcagtctcggacgcttcatcgtcacacgcacctccaacggacatttcagccacggaagcttccaccttttaagaggaacggacacgccgctgtccagcagcgcatccgcacactccatttctatcagttgttccagccggtcagccatacactatccctccttgcttgtgacctcctcactttgaaccgaggcagccgccgctgctcccgcagcaggcagcttgtgctctccccactcttcgggcagggtttccgagtcaaacacgccgtagggctgcgaaccgtcctccggcatagccacctccaacgtacattctatcttggccgtttccgtaagcgtcagcttaccgcccaggttgctcagcagcgtgccgttcggtatcaggatgctccgtccgctcaccagttccagttcgaaaggaccttgcatcagcagggcggcttgtggagcagtccagcctattgggttcttcttctcgttgtcttctttcgcatagtgcagcgtgccgcccagcatggcatgcaagttcttgtagtccgtctggattacgttgaatgtgggggcgatgctaccgttgctctgcggaatgatcagcacgggggcacccggtgcctgttccgcctcaatctttgcaacttcgggcttctggccgttcaggtcaaacgagcctttttcaatatagcctatcacgaagtcattgtatttcacggcaccgataccgtacataaaattcttgttcatcgtttataaagtttgatggttaataacacaccgaccaataagccggccaatacacctgtgataaacgtccgcatccggttcggaggacgtttttctactgtttgaacgtcattcgaagtttcactattggtctcgtttcggatgcgtgtcagctcttcttcataccacagcaccaactgttgcaggctgtcacacgaggcttcggccacaaggttaccgctaccgtcagtccctacaatcagattggcctgtccgctcttgccacggtacaccgcgccgtcaggaagcttacggaggctgtccgccggtatcgtcagctgcaccgcactcgccggtatccccgccatcaccagtcccgcccgtcggcttacattcgcgctgtcggcgcttgccgattccgtccggacttcccgattcatgctctttcggtgactcgcgcaacctgtcaagcacagggcaatcgtcacgatgaggacagtttccggctgtatcaatggcttttctaagacgggccatctcgcgcgtattgcgggccagttctttctttgtttcacagaattcatcttttagaggttttacaatattttccatcaaaatgcgggtggcatgttcggcattatctatgcgcatagcctctgcgccggcctcggccttcatcgcttccgctttcgcttttctcacagtagcccgcaaggagccaatggtcaccaccgtaccaaccaggccgccgccaaggataatgttcataaattcgctcaagtccataccacccggttttattattgattaatacctatttctttcaaccattcctgcacatcgaaactcggacaggctttcgctgccagttcgttgtgtcctacaatgcgtacatcagggaaactggaatgaaacgcttttacatagcgttccaatgcatccttctgctcctcggtgcgggtatctttcggagtcttaccgtctttttccacgcccccagcatacacgatgtgacggcttacactgttatatcccttggctccgtttgtcacttcccaagggtccacctgtgcatcctcattgttttctaccagacgttccacgcctccgttcaggtggaacaagtcggtatagccaacctgcttccatcctcttcctccctgggcaaccggagaagtatgccatttgcggatgtccgccgatgatacctcacgcccctccggagttgccgtacagtgaattaccagatacttcaattttcccatatcttttatgcttgatagccgctcatcattaccactccggcatcctctttcttgggcatacagatgaagtaatggcggaagttaatcagattacgctgattcaacgggtcgttctttgactcggaataatacatcttggtagaaccggttgccttgaaaacccgctgtttgtagaaggcaaacgaacacgggaattcaccggcttctgccgttgtacccaatgccttcttcatcccagctgtagtataaagcgggttgttgccgtactcatagatttcaaagccataaaggttacctaccttgccgctgttgcggtcaatgttgtactgttcacggaatgcctggctggtcagcagcaggtcattcacatggtcgggacaaagcaccagtcttcgaccgtctgacggtacgcgcaggttgtcaagggcacgcttcatttctacaaggtcattcacggtaaggcgcagacggtttgtagctggatctttctcgccggtagtcttaagcaccggagtggtttccgtatttttgttcgcacaaagcgcatgggctgccttggtgaacttcgcatcattgatgctgttggcatgtccctctttcacacgggcggtcttgtcataactgattgcataaagctcatcgtctgtaatcggcgtggccttggtctggaatttgtccaacttgatggcaatatccttgtcctccaatgcctgcacatcaatcggataggttttgttgttaatcaagacatccggatctacaccaacttctaccagatgaatcacatcgttgttcacgatactgctttggtcggggattcccgccagccaggttccttccagtccggcacgaagcaccttgacaagttcccctgtccagatttccgtataaaccccttcacggagtattgaagcactctgcggggtcattcccataaaggctgccaccgcattcattcccacagctccggccaccggagagaatcccaataccgaagcacacacgacacctgtcagcgtattgaacagaagtgccgtcaaaagcattacaatttttcccattttcttcattttaaaggttttcaaatttcacaggtcatgccgtattcagccttgtacaggcgcttgtactcctctgggttatgctcgcgcatttcaagcagcgcatcactcgggacatcgctcagcttggcataggtggacggctgtgcctgctgcttgccgccctgatagctcaatacagtggaaatcttcacctggggctgcatggcatcaagcacattcttcagttcatcgacaccgaccttcttgccaagttcgataaactgtgtcttcttgtcttctcccagacgcttttccaccactgccttttccacaaggctggtgatacgggccaaagtcagcttcccgttttcttgtttcaaggaatcattctctgccttggctgctttcagttcatttaaggctcgattaacatcagcctccgttgccgtttccggcagccccaattgaagggccaaaagtttcagttccatttcttctgttgttttttggttattaattagtggcaaaggacaatcaccatcctttcccaatgtgatttgttttccatccttcatcagtacgatggcatcatcattggaacctacgtccaccagtgatacctcatacagcttgcttttggttattgtagggctggtctgcccctgcagcaaatgttcgggctggtcactcagttccaaaatgtctattccggcactcaccattctcaggctgccgaattcaaactgtttcttgcatcttttactgaggtcggttgcttcgtcaaacaccagttccccggttacctcaccatcttccacccgaaggtccttcacatagccaatcacgttcccgcgttggtgcatgtacagcagtaccgggtttcgacaatactgctccacactcatgcccgatgtcagcacacggcttccgtagctgttcaggctgtcgtttgatattcttacacgtttactcattttctcatgccacgcctttatgcattggcgctgcaatattacagagcacttaccgggaagccaaaaaagtgtgcaatggttgcacacttctatgaaaccgttgcacattattttggctgcaagctgataagcggacaactttgcgaataaatcgggcaggtgcaaggaactccgaagcctgcctttaaccctatattctttattatatgacaaaggcagaaatcgaaaagaaaaaatctcttgcacgctcactgttcctttccggtatggagcagaccgaaattgcggagaaagtggacgtgtcacgcgtaaccatttcaaaatggtgcacggctgacggatggaaagaagcaagggcggcaaagaacgtcacccgtccggaactggtgaacaaactcctgctcactattgatacactcattactcaagtcaacgaatcaaacgaccctgcacttgtagccggtctcggggacaaactggccaaactttcggcggtgatcgaaaagttagacaagaaggccaatgtagtggatgtcattgaagtgttcatggcattctccaaatggattgaataccgttcaaccatcgacccggaagtgactccggaactggtcagggcaatcaacaagtaccaggatttgtatatcaccgaacagatgggcataaaataaaacggctatggcaacagcagcggaaaagaaacaggcatacgaacagtggaaggaacactgtaaaagagtgcagtccatcacggatacggctttgctcgcgggcgagacaccggcacaaaaggataggcgtattctgcggctgcagggtaactatgccgcgttctgtgagtattactttccccacttcctcaccttgcgtgacaaaaccaccggggaagtcatacgcaccatccacaatgcaccattccacaatgcggcagcggctaaagtaaaaggtacacccaacctgaaggcagtattcatgtggccgcgtggccatgccaagtccacacacatggacatttttgttccgctgtggctgatgttccagcccaagcgcctcatcaacttcatggtggtggtcggcaaaagcgaagattcagccacgcgtctgctgggggatattcaggcagaactggagcataaccagcgcatcattgccgacttcggcaagcagcaggggaatgcctcctggcaggatggggagttcaaggcagccaacggggtgaaattcctggcttgcggacgcggacagtctccgcgtggtctgcgcgaccgggaagcacgtccggactacatcgtcatcgatgacttggatgacgacgaactgtgccgcaatgagaaacgggtgcatgacattacagactgggtgaaagaagccctttttggtgcactggatgtgggccgggggcgttttatcatggtcgggaacctcatttctaaaaactcggtgctggccaatctcaccaagacaaaaggggtacatgtatccgtcatcaaggcaatagacaagaacggagaaccggtatggcgcgaaaaatggacgaaagaagaggcgcaggaatacagggatttcgtaggctaccgggcatgggaaaaggagatgatgcacaaccccatcgtggacggcactatcttccgggcagactggattcgttacaagaaactgcccagactgtccaagtatgaaatgctggtctgctataccgacccctctttcaaatcgaccacttccaacgactacaaggcttgccgcctttggggcaagattgggaaggaactgcaccttatagactgttacgtccgtcaggataccgtttccggaatggtgcggtggctgtacgacctctacgaacgtacacgcgatacggcagccgtgcagttctttatggaagcgaacttcatgcaggatgtcattctggatgagtttgaggcagaaggaaatctgcgtggataccaactgcccatcatgccggacaaacgaaagaagccggacaagctccagcgcatcgaagcggtctcaccattatgggaacgcggtttcgtattctacaatgagaagttgaaagaatcaccggatatgcagaccggcatcgaacagaccttggctctggagcgtggcagccgtattcacgatgatgcaccggatgccgacgagggagccatctggatgctgcagcgcaattcaagacaggagagttttcaaccggtgttcggcaaaaggccgaccgccaaaaatatatggtaacatgatacagctgattaaaagaatgatttttgcatggcgctataaacgtgccgttgcccgtgcttgcaagtatgccaagctctacggaagaaaatactacgtcctgtatatgggcggcaaactgaaagttgtccccaaaaggaacatctgtgaactgattcaccgccaccgtttccgcaagggaaccactatccgggatatagaaaaaatggcattgttcatcactaaataataaggtcatgttcattacagaagaagattacaaagttgtcatcggcgacaacgcattgaaggttatttcgcaggtaagcccggaaaaccgtaccaatgcagaagcggaagcccgggaagaaattgccggttatctacggccgaaatacgactgtacggccattttctctgcacaggatgaacatcggaaccgcctcattgtcatgtacacctgcgacatttcactttaccacatgagtgcagccatgccgcaaaagatgggaagcgagatacgcaaggaacggtatgaacgggccatcaagtggcttgaaggcgtacaggccggaaaaattgtccctgatttgcctttggctgtcggagaagatgggcttccgtccggaaattcatttgtttacagctgtcagaagcagcttcatcataactggtaggattatggatattaaagactttttcagcggtatgttttccaataaaccgaaaaacgtactgcaaacgccatacggcaattttaatctggccaaggggaaagacatcaagcgggtgcagaaaatggtcatcgacctgcaacgcaccaccgatgcactcacccggaaggacatcaagaactggcgcgatgcctggcagtatgccatcaatgtggacagtcccagccgccagcgcctgtacgacatctaccgggacgcggaaatagaccttcacctctccgggtgtgtggagcagcgcagaggttttgtcatggcacgttctttcaaaatcgtggatatgaaaggggatgagaacgaggaagcggttcacttctttgaccagtcctggttcaagcagctcatgcgctatgcacttgattcaatctactggggacattcgctcatcgaattgggcgacctttgcactgacggcgacggctgcatctgttattcggatgtgaagcttattccgcgcaaacatgtcattcctgagtatgggcgtgtcattaccgacctcgggcaggactggactacaggtatagactaccgccagcctcctttttccgactggctcattgaggcaggtaggcccgacgacctcgggctgtatctcaaggctgcttcacagactattcccaaaaagaacatgctggccttttgggacaccttcggggaaatattcggaatgcccatgcgtatagcacgcaccacttcgcgcgatcagaaagagattgaccgtctcgacaagatgttgcgtgaagccggaaccgccctctccatggtggcaggaatggaaaccgaaatcgaatttgtggaaagcggcaagggggacgcattcaatgtctatgacaagcgtatcgatcgggccaactccgaactgtcaaagcttatcatcgggcagacgatgaccatcgaggacggaagcagcctatcacagtcggaaacgcaccttgaagtgttccagaacctcgtggaaagcgactgtgatatgcttcgggatatagtgaacaaccagctcattccgcgcatggtgcgccacgggttccctgttaaagggctgcgcttcgattgggactactccattgactacacgcccgaacagcagaaagcttacgaggaaatggtactgcaacactacaaggtaaagcctcagtactttgaggaaaaatacggtatcccgtgcgaggagaaggagccgaaggaagagccggacccgacagatccgaaaaaaaagaaagacggcaaaccggctgaaacgctgtcccgttttttcgactgagccccgatgattattcggggctgcaccagcgatatactaaaatcttaggcaagaattactcccatttatcattgtgcttgagcaaaagcgaggaaaacatcgaaacttcagcaaagaaatgggcaagtgctcttagtgacaagactgcaagagctaaagcagaagaagctgcgcgtattattttaaggcatggcatagagttacctgtgattaaagaatctggccgaatgaagaaaaggacgcttgcacaattccggagtgacggcactccaacaatagaagtcaataagaaattaaacgatgatttctggaaaagagacgcaagatctgtagaaattggttgggccgcacaagataatcctattctgcacgaactcggtcattacattgattttatttgcaataaagaaaaatataataaacaaagcgaaaacaaaagatttttcggtgaaacaaagtcactgattgaaaaagaagtctcaatatatgctgctacagaccaatgggaattggaagctgaattatatgcaggaataatgagaggaaaggtctattccaacaatgtattaaatctctcacggattagccaatctgacaatgatataattaaaaggctcctttcttatggaaccggccaagatgtttgtctgccaagtgaagacattagcaaacaattcaagaatatgatgaaagttctttttcagcaggaaggaagttctttttccattaacatcatggcagacaaagatgtgcaaaaaatgatagagactcattcttctgtcctgaacggatcattccggcaggtggaaatgtccgaggctatgcgcaaacggctggagcgctccaactatgtattctccgggctgaagacctttcatgaactgaatgaagcctttccctccttattggatgagaacggcaatagaaagacgttcgaacgctttttgaatgatgtccggaagatcgacgaaacatacaattcaaactatctacgggctgaattcaactttgtacaggcttcggctgaaatggcggccaaatgggaacggttcatgcaggacggcgaccgctattatctgcagtaccgcacggccggggatgcaaaggtacgtcccacccatgcagaaatggccggtatcacactcccggcttcagacccgttctgggaggatttctatccgcctaacggatggggctgccgctgttccgtagtccaggtacgcaaatccaagtatccggctacggatcatgaagaggctatggcaagaggagagtcagctttggaacttgacaagaaaggtatgttccggttcaatgcaggcatggaacaaaagacgatgcccgactataacccatacaccatcaagcgctgtaaggattgcgatatgaacaacggaaagatggaactggtcttcgttccggaaaatgaattgtgcgctgcatgcaaactggttcgggaattagcaaaagccgatgcaaaacaaacacgtgcagcagccaagccattacaaggaactattatccgtaatacacattttcatcatgatgtgaatattacaggtacctctattagagaatggactaatcaaccgcacaaacatttcaaagccaaaaatcaaatgctgctggacataaacaatgtgttttcaaatgcagcataccttggcacaacagataaccataaaggtatcaaacgtgtcgtacagtcacacatttttgaagtggaagtgagtggagaaaaaaatttgctgattgtccgtgaatatgattggggagaatatgtgctgcatagtatatcggatagtccggaactttacaacaagataaaaaaagaatagcaaaagaagcaatcttccggaactacaatccggcactggacttctaatgctattcctcactgcaaatatacaaaacaattttcaaaaacaactcattatgaacaaaattatcgaatttctcaaacaaagcaaccgctataagcaccttattggcggtcttcttgtaggatttgccgccctcaatccgtggacggctctgtatgcatccattatcgctgcctcctgtctggaactcaaagacaaactgaaaggcggactttgggactggatagactggtctcttaccgtcatcggcggcatattgtcggccatattttggtggatagtgtaatgctttagttcattttgcctgttaaatcagtaactttgtacccggcggagcttcccgatagtccgtgtggtctatcgcgggtacaacaatgcgaacgcgaatggcggtgtatcgaatgcgaatgcgaataacgatgcttcgaatgcgaacgcgaatgtcggctcgcgtctggaaatctaattaatcggcgtacagcaccggggacgtgtccccaatgcggtgccgagggaagcaagccacagcaacagcacccattagggtggaaagctgaaaaatcacgcgtcgggtggagtttggtaggctgttatcagttcgaagaagtcagatccggggaaaggaaggcccttatctttcatgtttattaaccaatagcttatgcgcagggaaggatatattatcgaggaaatcatcgaatactccaatatgtcggaggcattcgattcggtacttcgcggaaccggtcgtaagaggtcaaggcagggacgattcctgcttgcccatagggagaagattatcgccgaactgacggcttccattgcggacggttcattccggctgggcggctaccatgagagggaaattgaagaatacggtaaaaaacgtattttgcagatcctgtccatgaaagaccgcatcgctgtgtttgccatcatgaatgtggtggaccgccacctgcaaaaacgttatatccggacaaccggtgcaagcatcaaaaggcgcggtactcatgatctgatgaactgcatacgtaccgatttgcaaaaagacccggaaggcacactttacgcatacaagtttgacatccgtaggttttacgacaatgcgcggcaggactttgttatgtggtgcttccggagggtgttcaaggacgaaaggctgttggtgctactggagcggtttgttaagctgctgccggaaggtataagcttcggactgcgcagttcacaaggggcaggaaatctgcttctgtctgtatttttagaccactatctgaaggataagtacggggttcgttattactatcgctattgcgatgacggactggtactcggtaaaacgaaagcggaattgtggaagattcgtgatgttattcacaggcaaatgggaaaaatagacttggaaataaagccgaatgaacgggtattccctgtagaagaaggcattgatttccttggctatgttatccgtcccgactatgtaagattgcggaaacgtatcaagcagaagtttgcccggaagatgcacgaggtaaaatcgagaaaaagacggcgagaactgattgccagtttctacggcatgacgaagcacgccgactgtaataagttgtttaaaaaattaacaggcaaagaaatgagaagttttaaagacttgaatgtcgcttacaagccggaggacggcaagaagcgatttcccggtgtggtggtaagcatccgggaactggtaaacttaccgattgtagtgaaggactttgagaccggtatcaagaccgagcagggagaagaccgctgtattgtggccatcgaagtgaacggcgaagcaaagaagttcttcaccaacagcgaggaaatgaagaatattctcgcacaagtaaaggaaatgccggatggtttcccgtttgaaacgaccatcaagacagagacattcggcaaaggtagaaccaaatacgtgtttacatgagaagagttgaaggaagtgccggtgtatcgctgatggaatgcacgaacccggttaaagacaaatggcgcatccgctgggatgtgcaggaaaaagagaacggctctgcctcctacatggaagaggagttcggacacaagcctactgatgaggaaatccgcacattggttatgtcatggtataacagccagactgatgcagctatcctatccggattcgcctataatggcgcccctgtatggctttctacggagaaccaatacaactataaggcagcatacgatttggccgttcagacgggcggagagacccttccggttacattcaaattcggttcggatgaacagcccgaataccatacctttgaaaagttggataatctgaaggacttctacattcaagcggtcagacacatccaaaacacactggctgaaggatggaaaaggaaagatgtattcaacttggatttatatcggattgaatgattgacaatcccttcgggggaaggataaaaaaaagcccccggcctgttaaatagtcgtctcacttaccatttaaacataaagcacctcttaccggcacgaccgggggcagataccctcgttcgccagtaagaggcttttttatgtaagcgctattctgcgcaatgataagtgagacaatgcaaatgtacgaaatttaactggatatgaaagtaattgagatactaaaattgaacagagagcttttaaaaacgtgccattacatgggcatacgacccgatgacgtgcaatatatagaactatataatgaatataacaagttgcagaccaatggtgaaaaagtgtcttatatcgtagctacgctttccctacgatatggcatcagtgagcgaaaggtgtatgacctgatcaagcgttttaaaaccgactgcaatttgtgtgcagtgtaatcaggacttcctcccactaaaggcaaactcccctaccctacctttgtatcgcaataaataacattcatatcatggacaagtattatcaaatcttaggcaaggtgctttcgtccggaaagatgcaaagcaataaaaaagggaatatccgctacctactgaatgaacagctgacgctgctccctgccgaccttcttgatatattcgaggggcataccatagcgcggaagaagttaaaaaacgagttacaactgtttatgaggggcgaacgaaacgtggaaaaatacagggaggccggaatcaactggtgggactactgcggctctatccttgtgaacagctacccaacctattttgaaaaactgccgccactcatcgaacgcataaacagggaaaaaaggaacagcaaaaactatatattgtttctcggatctacaggaacagaaagcaaccaggctccatgccttagtcttgttcagttccagatagagcaaggagaactggtcatgaccgcctatcagcgaagcagcgatgcgaatttaggactgccggcagatatttatcatttgtatctaatatcaagacagattgagttgccactaaaatccatcaccctgaatctggggaatgtgcatatttacgaaaacaacatcgacaaaacagaacagctgcttgccggcaatgaaaatgtaaaatttgaattgaacgtatgagaaagatgtatctgtcagcccctctcccatttgtcgggcaaaagcgtatgttagccaaggaattcatgaaagtgctggagcaatatccggatggaacattgtttgttgacctgttcggtggctccggattgttgtctcacattaccaaatccctcaagccccactctactgttatctataatgactttgataactaccgcttccgcatgaagcacattccgcaaacgaatcagctgcttgctgacattcgcgaaatggtagggaattccgtaccacgtcataaaatcattaaaggagaactgcgtgaacgaatattcagccgcatcgagcaggaagagaatagcaccggatatgtggatttcattaccctctcctcctctatcttgttttccatgaaatacaaactgtctgttcaggatatgcggaaggaagctttatacaacaatatacgcaagaccggctacccggaatgtacggactatctcgaagggctggaaatcgtatcttgcgattacaaggaagtattcaaccggtataaagatattcctggagtagtatttcttgttgatccgccctatctgtccactgacgtagggacctataacatgtactggaatatggcagactatctggatgtgctgaatgtactgaaggggcattcatacgtatatttcacatccaacaaatcttcaattctggagctgtgcgaatggataggtaaaaatagggatttaggtaatccttttgaaaactgcacaaaggtggaattcaatgctcacatgaattacaactcttcttacacagatatgatgctttacaagaaagaggctgcctgattgcgtttactttgcctgtattgaacaaaaaagccgcagacggtaatttgtacgtccgcggctttttctgtctaataaagacggctattgcagccgcttgatggccacacactgatatacctcgatactttccacaatatcctcatggttgtgattggtatcactctccaccagatccagctccaaaaaggtctccccgctcaatccggcaagctgtgcatgaagcagtccggacaggtcaaacaccttcagcgcatcctcctgcagctcgctgccctcagcactcgaaccttcccagtccgtcacgatgtgcagtttaatcaaaggttctgcccggtattccacaccgggaacaatcgcattccactgtatagggcagaattccacaaagacagccggacgctcccagttttcttcctgttcgatgaattccacattatggttccacaagtctatgtgcttgataaggtcaatggccttcagctcccggcaaagcatccggtaaagttcttttctcattttcttatgatattatattcaatggtaaaatactctgttaggttctcttctacaatctcacggacggctttttccacttcaggcgatgtgccgaggaaacggcgtcggggaatcctgatggtgcttcctgctttctttaaagccatgaacatccaaaaatcggcttctgtatcaagccggacatttcgtttgtcttttcgaagtttgccgtcttttcttctaccgaacgctccggttgcctcataatacttatgccagaagaaacgcttcatccgcttggtcaccactatttcaccgccatcattatgaatggccgcatagggcagagaggtaaagaaggtaatgctgttttccgttgtccgacttccgatacttttccgaagcgccccggtatctgttagtatggctctaccttcattccggatggggcttttccgtcgctgccatttctcactgaaaaaagcctgccgttcaaagttcttgtcaaactcatcactcatttccacctgaatgtctttcagtatccgggccactactttttttacgttttcattcattcccagtcaaagttaaatttcaattgtaccgtatcgtccggcaaatcatttttagggtctgcggacgctttaagcatattgtagaatgtacgctcactaatagcatacacaggatatatgtaccgccgccatatttcacggttcggtacaccgtgactggcataatggtcatatatcctgtttacttctactacacgcttctgataactgactccgtgccgctttcccatataggtttaatcgttcatagacggttctactttaggtttatagggacggatgtcaagcgtcatttttgcgcttaccgttacccggccacttccttcacactgtctgcagacttcctcaacggtttcgcttcgcttctttccaaagatccgagagggatattctacaactttctttactttacctgtaccgtagcaagcacggcacagggctactttcggagatttctccacttcttgtatcatagttctattatttatgattctgtcattcccagagggataggtttccacattccgttttcgtttttgatttcagcacggataaactgtttgctcacttccggctggtaggcttcctcaatgatacgcacaccttcaatgaaacggtcatctccggtttccatggccactttgcgaagctgcacgatgcgtgaagccttcagcgttcccttggcatcacgggccaacagacgaagcaccatgctcaccagtgccttggtcttttcatctttggccagaccttcgatgtattccttcacaatggctataccgtcttccaccgtgtcacggtaaccgtcggtcacatacacacccagcgtgattcgtttgtcgccttcactgttagtaaaggtatggctgcgctggtcatccttcaccttggtcttgaaaaggtctgccttcatttccagaatggttttgaagttgtccatcacagtctgcttgcttgccttgatctgctcactgatgcccagcagtaccggaatggagtttgctatctcctcatccaccatctgtttgtacatttcgcggtcattcttggctttttcctctgccgctttctttgctttttctctctggaaggcttcaaattccgccttttcctctgccgtcattaccacggtcgtttgtttcatttcttccatgattcttgttttttggggttattggttttcataatcctgcatttcaggttcgtcttccatcagcatagcctctccgttggcgtatgcccagtcagccaattcactataaaactcggctgcatcttgcttctccatatcagaggcaagcaggttgatttcctttttcagattctctaaaatctttgtgtttctattttccatatcctatcagtttgccggagcatcagggtcaatctgaatgagtgataccatgctcacggggttaatcgtttgcttttctttcctgggcttcaagccgcctttccgttgtatggaccgaagctttaccgccagttcatccagttcgtccaccgtaatctgtctgaacgctttgccgactattcggggattactgcagaagtcattgattcgtgcccagtcggatgtatctatgcccagcttctgcatcaggttcagacagagactccgtttccgccgcagctcctcacgcagcttctgtcgccattcgtcttgtccgctcagcttctccagagccgtacagcaggcttcatactccttggctgtcatttccttcagactgtccgtccggttccacgtgtactgcagcacaatgcttttcttgaattcttcccggtctcctgtacagggaagcttgttgaacaatgtgtagaaccgggcgaaattggttacttcctgtgccatgtcatttaccattaagaatcatttcacattccgttgatttggtactgacacgataaattatcttatccggcttcactgatttacctttgtattcagcctcaatttgcttagcaaatatctttttgaactcatcacccattttagaaagtatttctttattgtactccccgcaaaaacctatgcgtgaggattggatttcacgaattgttcctctatataccgtagcggtcaacttcatcaccacaacaccggtttccatttttatttttcccatatcgactaattttattcaaacaacactttaatgccacacgaactggccacgtcaagttccagtttggctcccttgctcagttcccagtccttcagcatatagatatagtcacaagccagcaacagggcaatgtcggcccgcatgtgggctctccaatgagcttcatccggcaatccgttcctgaaagggtttacagggtcatagccttgtgccttcagttcctcctcggcacggctgaaggcttccttgcgctcatccatgtcataatgcgcgatagctccgctgatgtacaccttcccggcaccggtcgcctcaccgcgctgataagccttgtgccgttcccaccgttccggaacgaccacactgtagttgcacgattggcagcagcagccttcttctttcaccgggaacggattgtatccgtagccctcatactctttgccgcagatgcagcacactttcttttcttctttcttttccatcacttcaaatctttttaatgtttactttacaacttggattccatatcagcacattacgtgcaaacaagacatcacccgtttctattacgacatgaccgggcattttcgctcttctcacttttaagtcgctttggatgtttcgctccagccagtcatccaatacggaccggctggaatttccgtccagcagtatctggaacacttcagttccggtgtagctttcaaaagccttctcgttattatccataatcattttggtaaattattacttgtttgaatgattccgtcttcccataccacataatagcttcccgggtctccaatggcgcgtccttgacaataagctttataaccgaccacccgaatcttcatatcacagatatatttcaatcttactgcaccgccacccatcggctggcttttcttttcctggctgatccagatgaaacatttcttcggaaaggtttccatcagttccacagcctgcggataatcccatccggccacctgaaaggaatcgatgatgataaacttcgggcttttcggttttttcagtctggcaatcacttcctccagactgccttctgtcaccacacgaaatttaccctgcacctcattcatcttcagataacccatacgccgttggaagctttggttgattttctcttcgtaactcatgtacagcaccgtcccatagttgcacagttcctttccaagttgcatcacaaagctgcttttcccactggcactggcaccgctgatgaaccacgaagcgttctctgccgggaacccgaaaggtttgctccatttctcatcccacggcagagtaacccatttcttggcggctatttccttcggactgtacgcacgcttcattattccgctgtcattttaagtttctcaatctcggtatagactcttctcaaaccaccgcatgtcttccgtacaatctgggctatatcagcccccgcaggagcatttaccttggctacaatacgtgcctggttgttcaagaactgttcgcgctcctttccatcatccggagtcaccttgctgtaccggtcaccataacggctcaacatttcggtatagcccaccttcttacattctatggaccggttgattttctctttcaatccgtctgcccccatcatataccaggcgcagcagcgctcagtggcattccataaggccttcagttccaggaaagcttcatactgcaggtcgcctgcttcatcgaggatgataagcggggtttccatcgaacggaggtaatataccaggtcttcatacacatcagaatacttccccttgctgtccacaccaaactctgcagcaatcttgcgtaccaacttcaattttgtctttacctgcgagcagtcgatataaacggcattcttgtggctttgcacataataacgtgccgtgaaagtcttgccgatattgggcatgtcgcacaagatgcccgacagactggactgctgtgagaactccagctgggcagttatatattcaaaggtcggggtcttggctgctttccattccatttcaccacggaggttcacccctaatttgcgggcaatgcttatccagttggcatcgctcagggctttgtctgtctgtccgttcttgattgcactgtacacagatgtactgatggctaaagaggcagcatgcttggcatcactgggatagttcgcacggttggcggctatcgctgctaaaatcttctgtttttgcgcttctgtaatcataattctaacgctgttttaatgttgttctaattctattcttacatgtcactgatggccctcattgcctcgcttattccggagtgccattcataatctgattccggatctgccgacaattcggctggcaaatcatcggatagttccaccgggggaagttccagttcctcttccgggtcatccgttggctgatccggtgtaccggttcccacctttccgatggcgtggtcattgaggtatttgctgaaatgactcagaactttgttttgctctgtataggctacccggtcttcttcggtctgttctgccatcacccggttgtaagtcactaccggacgaaccttgtcaaggtagcggtcgttctggtacaggaagacatccgtaggcttgccctcttcatccggcagatagtaagccgtcaccttgcggttgtttggttccagctgctccagcacttccggaccgctcagccaccagtccgcatttgccacacgtactgtggaatttctacgaatactggtatctaccttttctccgatatatctgctcaaggtcagtttatcaagcggtcgaagggtcggattgattttggctacgagcacatcccaacgggtcattccgggatatttcttttgattggggtgaagcgtattgttccattcttcacaatcgcgccggtcgtccgccacaagctcttcaaacgtataatactttctgtcttcccaggtgtggttgctgctgtcactcactttcttctggtccacccgccgtgcacctttgttatgccagcgaccaatggcttcatggttcttatgtgctatggttgtcttgaacgcaccgttcagagcttcagcatatttctcctgtgagttctgtggggcacagaaatgcacaaacttaaatacctcacctgccttcaggaatccttctttatacttgctcatcaagtgctgctccacctcaataccggctggaataccccatccgttgcgttcgatgagccggaacatatcacgaaaacagtccactaccaaggcatcatccttatcccgcccgtaggccagcccgatacggcactggctcaccacatcataagcataataggcatgcacatactcgccgcctttcatccgacgcggcaaatccacgtcatccatcgttatttgtgacagggagaacttaccaccatggcggtgcatgtgcggcatttgctcatgatagaattccatacgtccacgcaaggctttttctatcagcagctggcttgccgggttgttcagtatgttccggatagtgctttcgctcagttctttcggttccccgttcttatccgtaaagttttccggattgaatatctctcctgtttccagatcccatacttccagttcaccgcatacaaacgacagatacatttcatgcacatcactgccgtatggttggttgggaagtactttcaaactcatcaccaggcgttcgtccatgtgagttaccttccgtttgttctggttgccgaattttccggttatcaaacattcataaccgtattgcttatattcgttcactttcttgcggaaacgaagggtactggcaggaagatcatgaccaaagtcttcgcgtagggtctcgatggtggtggccatcatgtcccagttatatttttcacccatcagttttcggtaatcattgtttctgttataaagcttgatacaagtattcaacacggaagcattcaccgcatatttccgggcaagttcgtctgttgctctgttgctggaagaatgagaagcccaatccaaaaaataggctactgcagcctgatccagcacatagtttgagagtatccagtggcgaagtgcctgctctgttccaccggggttgtcttccttcacccgttccagacactcggtaggcaggctattgagggcgaccaacgcgcaatttccagcagcacctccaccacgacgcaccaccttgatacggccacggttcacccagttcctgtagcaggattcggtgatatagccgccatctatgagctcacgtgcagaaatacactgtatgttaccgtaatacaccaacatagccgcctcctatctcaatgccgatgcaaacgcttggatttggttaatatcggcaaccatcacatgctcgtaagtcttcaccgtttctcccttgaatattacctgaccgctaccatcattacggtcaagctctatcaaggcaccgttcggacagtactgacgcatcacattgtcataatcatggaaagtttctatttccggaataacaaccatcacaataccgccacgatccatggccaacttacggatctttgcagaaagttcggagttgccacgacggtcatcaaaccggatagcgttataaacagtcttctctgtcacgttgagtgcctttgcgataaagtcgcggtcggctttcgtaatgtgaatgtacctcttgttcatatctcacttgttttaatgattaatattggggggagtccggggaatcgaaccccggcacaagaaccatgcactcccgtgtgtctttccacaccgtcacccgtctcttaacgccttccgggttgtcacgctgggtttactgttgtccctcaaccttttcacctttttcaataatcccaagaagtatagtgaatttctcacgtatcttctggttcacttccagttccaacgtatgcgccaaatttgaagccgcactggtgctgttcttgcggatgcttccggtaagaagactatcagtcagactgtttatcttgctttccatgtataactttacatcatcatggctaccggcagataaaaccaccttcaaggcacggtaacaggaaagttcacgttgcgtcttgtacatatcctcggcataccagcagaagaaatgttcaaaatcctcattcatgtctttggtgtacttgtcagcctgtcttaccaaatcatctatatgggtctttacagaactgaatacaaaatcccagcaactcattttcttgttttccataatctcacttatttaaattcgtttataatcggtttcaaactcacgccgtaacaactcatcaggcggcggataaggttcttcacataaaaatcaggtgcggaaaacacaatcccggtctcttcggtatatctgaagctgataccgtccatcatcaacacgtaagccaccttgtgcttcacgctctgtgtctgccattcttttatttcttcgttcattttctttaatccttaaaattcgctaatcacatgcctttttcgtatatttggcgcggtgttcctttttgaacacgctgcaaatatatagaatattttcgacactaaaaagttttatgtagataatttacgacttatgacgaatatttccgacaggattgcaatcctaattaaagaaaaaggtatcagtacaagggcacttgaacaagctattgggtgctcgaatggagtaatttcaagatgcattagcaaaggaacagatatatcaagtttatgggtgtcgaaaattatcgaaatacataatgatataaaccctacctggttacttactgggaaaggtgatatttactataatacatcatctacaacaacacaaacaaccgaactatcctctctccttgccttaattagagaaaaagaagaaatcatcagggaacaagatagagaaatcggacgcttagaggaacgaatccggcaaatgacaatcgaaaaggaaaaacatgtatcggatgcgcccatttccggtactgcaaatgtcgggtaggcggatttactattaccatacaccggtgatggaaaacgaagcgtaccccctatcatcccccatgatgtccccctcccaagcaatccccctcccctaccattatataagggcataaaggcactgatattggggaatttaaaaagtaaaacgtgaaaaatgataggtttttaggggggggctatcaaataaaaaacaaggggtatttttaaaattgtggtattttagcatgtctgtatcgcacaccgccaaaaccctattttgaatatccagttctataaaagtgaatatccactttgaatatccacctgaatatccagcgtcaaaaaagaccgatttcaagcacaaaaaaaggggaggtataaccacctccccacaccggatcattctaaagccgtttttattgcctttttagccgcttattattcgtctgatacatttccactacgcccgcaagaaatgagcgtagattgctttattatagcctttttggtgcatacagtcccgttaccagataatcctgcatgaagcagataattcttcgttgcgcccacctgttctgccgtcaaaacagtataaatggccgttatactactaaaataccagtctttccgctttgttccttctattccgtgtgtcaaatgtatatgtattacctttgccataactaataatattttgtcgcaaatataccaaataactattatatggaataatttaagcagcattatatcaaataatcaggcacaaaaaaagcagccgcagctgccactcactcccccaccagaatcaaccatgtaagccttatgtaaacccaattaaacctatctgcaaatctgtatgcctaaaaagcacataaatgtagctgcaaattaaacccacgtaaacgtttcgttttgcagagccatccactcatattttgcataacattttgtatatcaataggtttgatattctttccgctcaatcctcaatatacgtttcgttctgtgccccatagataaacgatgaataaaaagattttaacggctattttaataagtattgccctgccagggggcatgctgtccgcacctgccgacagcctccggctgaaaagctacaagcttgatgaagtcgtggtgaccgggacaagaaatgaaacagacatccgccacctgccaatgaccatctccgtagtgggccgccagcaactggaacagacctaccagccctccatcctgcctgcactgaccgagcaggtgcccggacttttcaccacaagccgcggcatcatgggctacggcgtatccacgggagccgcaggaggcatgagcctgcgcggcataggcgccggggtgaatgccgccggaggacctacaaccagcctgctggtgctgatagacggacacccgcaatacatgggcttgatggggcatcccatcgccgacgcctaccagagcatgatggccgaacgggtggaagtgctgcgcggtcccgcctccgtcctctacgggtccaatgcaatgggcggggttatcaacatcgtcacccgcaagatgcaggaggacggggtgaaaaccaatgcgcagataggatacggttcctacaataccctgcagacggaagtctccaaccgcgtgaggaaagggcgtttcagcagcgtggtgaccggctcgtacaaccgtaccgacggacaccgtgacgacatggagtttgagcagtatggcggctatgccaaactgggatacgacttcagcgacacctggaagctgtggggcgacgtgaacatcacccgcttcaacgcctccaatcccggcgaagccgacaatccgtatatagacaacgactcgcgcatcacacgcggcatgacctccttcgcactggaaaatcgttacgaccgtacttccggcgccgtgagcttcttctataactggggccggcacaggattaacgacggctaccaccccggagaagagccccagaagtcgcacttcaactccaaggaccggatgctgggcatatcgtggtatcaaagcgccacgctcttcaccggcaaccgcctgaccgtaggtttcgattaccagcacttcggcggagagtcctggaacaaggttgtcgccatcgacgaggcaaaacccggacagcagattggtgaccgcatccccggcgtggacaagcagatggatgaatttgcaggctatgtggatttcaggcaggacatcaacagttggctttcactggacgccggtgtccgcatagaccaccattcgcacgtaggcacggaatggattccccaagggggactggctttccatctgccgcggcaggcagaactgaaagcaatggtgagcaaaggattccgtaaccccaccatccgggagatgtacatgttccctccacagaaccccgatttgaaagcggagagcctgatgaactatgaactctcctttacggggcagcttttgggaggggccatgtcctatggggtgaacctctactacatcaacggggacaacatcatcatgacggaccctgccctgcgcaagaacgtcaactccggcgagatagagaactggggtgtggaaaccaacctcggataccgcatcaaccgccactggcagatgaatgccaattatagctggctgcacatggagaatccggtactggcggctcccgagcacaaactctatgccggtgcggactttacgcaaggacgttggggcctgtctaccggtatacaatacgtgaagggtctccatacctcggtcaccccgggtaaggagaagcaggaaagcttcgtactctggaacctgcgtgccaactaccgtctgtgcagttttgccgacgtcttcgtcaagggtgaaaacctgctggcgcaacgctatgaaatcaatgcaggcttccccatgccgaaagccacggtgatgggaggcgtaaatatcaacttttaatacattacaactacatggaaacaaaaacagttaaactctactcgctggattacaataatgtgaagacgtatctggcagcctcgctattcattcttggcaatctggctcttccccagctctttcatctcattccccagggagggataacctggctgccaatctatttcttcacgctggtgggcgcttataaattcggatggaaagtggggttgctgacagccgtcctgtcgcccgtcctcaactccctgctattcggaatgccacttcccgcagcacttcccgccattctgttgaagtctgtattactggctgtggcggcgggctgggcagcacaccgtttccagcgcatttccctgcctatcctgctggcagtagttcttttctatcaggtagcaggtactttgggagaatgggccatggtgggcagcttcttccgggctgtacaagatttccgtatcggtgtgccgggaatgggattgcaagtggcaggcggatatttactgctgaaatatagccttcaataagcacgctttcagggcaaaccttatttcagcaattccgcaaaggggtgtattccacccgataaatgcggtcgaagaatggtgcccactcattgtccgtgatgccaatctgcagaccgtagaagtgtgtaccggcttcccgacagcgacgaatctcctccataaaggcaggtgaagagtgaggaatcttgaagtcgctgacccaaagcacatcggcattcatatactccttgccttctttgagcaggcggaacgtggcttccagcatacgggtggcatctgtatccccgcaagctgtctttgagaagaattcgagcagccttgcccgctctttccttacgtcaatcggatggatggagacggaaaaggctatcagaaagcagtcccgccgttgacggtcggctatctccaggagctttatcagcagggagtgggtaatcttctccggcttgccagccatgcttcccgaggtgtccagacagacaatcatcggacctttgggacgggcgggcttggtttcgatgcgccgggcaggctgcatgatttccgatttataacggaaggtctggagcttgcgagtaaggtatttgtagacgaacaaatcttccagttcactgtcggcggaatgggcaagctcaatgggaagcagagcattgaggtcgttgccggtactgatgcccaggatgtcacatttagaggagtgctccattttgtagacgtttccctcggcaacgcggatttgctcacgtccttcgtcgtctgccatacgccccatcttgcgggccactttcactatctcggggcaagagcgctggatgcgcacgattttccgtatacgctcaaagtcgacagtattccacaagccgctcatcatgccccaggtctggaagaattcgtccttatccacccggttctggcggatgtactcggggatgtctttcagattggaacggagcctgcgctcgagggcatctttgcggaaagcaatctctttctccttttcttcgtgcatcttcagttggaaggcgtcttcccagtcgtccaccattttctcccagacttcatcgtccgcatatcctccttctgtgccgaagtggctgcggtagaaacgggagtcgaagccgtactcccggtatttgtcggaaatctgctggagcaaggcttgccagccgtctttccgctttgccatggaccattccagcacgagtttcatcccggtccgttccgactggcttttccggaggttgtacctctccttctccaagttcaattggatgaactgaatcatggtgtcgtaaaagatacgtgcacagacctcatcgcccagcacctgcaccttgaccatggagtcgttcatcacagagagtagataggcatacaagggctcggtatccgtctctgcgcactctccggtggcaacgaaacggtccagtgcctgcacatagaaggcggtgtcatatcgggtgacggtggtgttcatcttcttcttggttactggaggattattcgtctccatatctcagtttgcgcatgtccacacgcgcccaggctatttccttgcggacgatggagacgtattgagctacgctctttttgtcttcttcggagacgaaaaggttttcggacaaatctcttaccaggcggtctatgctggtggcggcggcgtccagttccgtctcgtagtcacggtcggtgacggagaggtttcccagccagagttgttgctcctcacctcgttgcagacgccgcatggggaagcgcacaccgttgatgtagagatgcttgtcgtcgcggtagagggtgacgcgttcggtgccttcctctttcacggcgccggtgtcggcaaaggcgcggatgatggtacgcttgggattgatggggtcggcatacattacgcccaaggtgggggcatctttggcgctgtactccttcagatttttgtagtccacgataaagatgtaggtgttgcccgtaccatgtttctccacctggtagtagaagtgttccgttatcagcaggtcatcgtccctacggtcgccggcaaggcgggctttgtcgagggcttcgcgcacacggctgactttcaaatcggatttcagcgaggaggcgataccggcaatctgttttgtgtgggacacgaataaggcacggataacgatgtcacggatggcaacgctctcatcaggctcactccataggcagtggtagacgggaagcaggtcggtcatggagacttccgtgcggccgtggacgaaggcggaggtcttgagcagcttcacgatgttcttccagcggcggtcgctgacgtagacattgcggcgcaggtcggagtcttgcatctctacgcttgtcagtccgtggcgaatggctgtgatgcaggaaagaacatcgagaggcaaggttacgcggcgtatctcagcttgccattcggcatactcgcggtcggagatttgccattcgcaggcagtcgtttccggatggtcggcagaatcgtccagcagcattttgtagaaagactcttcctgcttgatgcaggtgcagagaatgcggataaggaagcggtcccatagggcttccagtccctcgccttgagcgggcagttcgttactggcagctacgagcagtttgagggggagatgcagttccttgtcgccattgcggaaaagtttctcgttgatgacggtcagcagagtgttctgtatggcagggcctgctttccatatttcgtccagaaacacgacatcggctgtgggcagatagccgtcgatggcacgttcatacttgtcggattctttcagtcggctaatgctgacaggaccgaaaatctcgtcgggcgtagagaagcgggacatcaggtattcaaaggcacgggcatctgtaaaagccgactttagccgcctggctaccattgacttggctactcccggaggtcccaggagcagaatgctctcgcctgccagagctgccagcagggagaggtttatttcagtttctttttcgtatactccccggttcatttcggaaaggaggagacgaatgcgttgggttatttccacaatatgatttatttatagtcagtactcatgtataaagaaaagtgtgtaaagatacaaaatagtagggaaatcagagagagtcttattaagattcactatctttggaaaacaaatacacacagacacgcacacacgttgtgatttgctttcatttcctatatctattaccatttctacctggagacaaattgtccccaggtaagtgaccagtccttcatcgggtcagtccctattattggggatttaacaatcccccctcttttgccgaaaactaaaactttcctccccaaacactacccttcgtatcacaatattttatacctttgttcactaagaaataatcgtcccatacccatttctgtttcgttcgacagctgtcggacgataattaaacaactgttggacgataatgcaacagttgtcggacgattagtttttaggaagaagaaaattaatccgcttagcgacaaaaataattccccgaagcgacgagaactgtttatcgctataaacaaaaataaatatcttatgagcgcgtattacgacctttacgaaacgccttcgcccgacgggaaagaagacaagaaatcactccatgcacgtatctgcccgaaaaggacttatacccaaaaggagtttgtggaacatatcgcaactttccaacatctgcccaagaatgtgataggagcagcattggatgcctgcattgacgagttgtgcgacctccttgccaacggaaacatcgtggaactgggagaactcggcttcttcagcacttcactgaaatgcttgcgcgagaccgacgatgagaaaaagaaaatccgttccgaatccgtccaattccaaaacgtgcacctgcgcatcagcagcacgttccgcaacaacatcaagaagaaaatgacgttggaacgtgtacactccactaccaagaaatcgaaaaaagtagtagagaccaccgaagcaacaagaaaagccgaactggaactgttcctcaagcagaatgtatgcatcaacaagaacgaatacatccaattgagcggactaaccagacatgccgccatagacgagctgaacaaattcatccggcaagggttcctgcgccgccgcggaatgggaaggtcaacggtctatgtgcggcaagaaaaagacacagcaaacgaaatttagggggggggcgaacacagagacacaaagacatagaaattaatgctttatctctttgaaaagaatctctgtgcctttgtattttcgtgttcatccccccaaataataaaacaacaaacaatggaaaaatcaacagaaccccaaccctgcacgcagtggttcgtcttcttcaaagaccaactgctgctgaaaaaaggatatacagacaaaggagaaataaaatacagcgtacccgtcagtatagagcctcctctgacaccggaagccggaagtaatatacacgaagtgttcccacccaacggcaagcaagtacgtgcatttgctttggaacagctcgtggccgaaaccgatgaatgggtcatgataggcctgcgcgcatcgtacgactacatctcgccggacgagtaccgttctgcaggaaaggccttccagatactctattgggacgagcacagccgcttctgccccgtgtgtggcaccgccatggagcaccagccccccatcatgaagaagtgtcccaactgcggcaatgagatgtaccctcccgtttccaccgccatcattgtactgatacgcaaaggagacgaaatcctgctggtgcatgcccggaacttccgaggaaccttctacggactggtggcaggcttcctcgaagccggcgagacactggaagaatgtgtagaacgggaagtttttgaagaaacggggctgaaggtaaagaacatcacctacttcagcaaccagccctggccctaccccagcggattgatggtgggtttcattgccgactacgaaagcggggagataaaactgcaggaagatgagctgaccgctgccgccttctattccaaagacaacctgcccgaaattccacgaaagctgagtatcgcaagaaggctgatagactggtggatggagaacaattaaaaattaaagaattaaaaagaggggggaagaaatttaaaaaagcaaattgcggaaaacacacactcacaaacgaacaactacgaatgaaacgactctcattcacatcaaccaatcggtgtgtaaccgcaatctgcatatactaaacttccctgcaaacgttttgttcatcaaccatcgggtttaagtctttatttaagttttctttcaacacagaagcaaaaggaagaggcgcagccctcacgggttacgcctctccgaacactatatacacattttttcctctttcctatcaaatgccgagtgacttgcgcactgcctccactttcttctcagcttcggcatcggcgctggtatagcatttcggacaacccatctcgcccttcacctcgatatagaacttaatcttcggttccgtaccggaaggacggacagaaatcttcgtgccgtctacagtgaaatattgaagtacattggaagtctcgggcatatccagcttgcttacgttgccctgggcatcagtcagttccagcgtcttgtaatccttaatcaggctgacagccgaaccaccgatttccttcggaggattggcacggaagttatccatcatcgccttgatttcctcggcaccactcttaccgggtttcaccacgttcacggtggtttccttagagaatccatattctacatagatttccatcaatacgtcatagagtgtcttgccctggtctttggcccaagcacagatttcggccagcaaagagcaggcagaaaccgcgtctttatcacggacaaagtcttcggccaggaagccatagctttcttcaccaccaccgatatactgctgcttaccttcactcagacggatttcgcgggcaatccacttgaagccggtgtagcagtcgcgcatttcaatcttgttcttgtctgccacagccttgatgagttcggtggtcacgatggtcttcacgatgaagtcgttcggctgcatcttacccattgcaatacggttcttgatgatgtagtacaagaagatgagacaagtctggttaccattgataagcacccactcgcccttatcgtccttgcaggccataccgacacggtcggcatccgggtcacttgccattacgatgtcagcgtcaatcttcttagccagcgcaatggccatggaaagggcttcggcattttcgggattcggagaaaccactgtcgggaaattgccgtccttcaccatctgttcgggcacgcagttgatattctcaaatccccactccttcaatgagtccggaataagcacgcggcctgcgccatgaagcggagtatacacaatgctgaggtctttctggcgacggatgacttcggggtcgatagagatggagtgaaccatttccagataaaccttatccacttccttgccgataatctgaatcaagtccttgttgccgttgaacttgatgtcggccaccgtcaccttgttcacctcgtctatgatggccgtgtcgtgcggagcgagcacctgcgcaccgtcatcccaataagctttgtagccgttgtattctctggggttgtggctggctgtgatgttgataccgctctgacagccgaagtgacggatggcgaatgaaacttcgggcgtaggacgaaggtcatcaaaaagatataccttgatgccgtttgcagagaagatgtcagcagaaatctttgcgaacttgtcgctattgttgcggcagtcgtgccccacaacaacggaaatatccttctttccggcaaaacatttgttcagatagttggacaagccctgtgttgcggcacctacggtgtagatgttcatgcggtttgtaccggcacccatgatgccacgcagaccacccgttccaaactccaggtctttgtaaaaactgtctatcaattcggttttatctggattttccaacatgcgtttcacttctgcctgagtttcggcatcatatgccggggtaagccatttttcggctttctcagtcacctgcttaatcagttcctgattttccataagactgttattattttaagggttaatataaacttttttgtaagacacaaatgtagaagaataagttcaaatatcctaattttattcaggcattttatatctgtctcccgtctgcttaacatactcttcaaggaactccttcgggtatcccgggcggattacgcctgccggctggccaatggaattgcgttcgaactgaccgtttttcatacgcttgacaacgccgtcattgtactttacgacaagaaactcgccaagacgtttccaggtatcgaaagtgctttgggcggtcatgttcgtatagttggttaggaatgccttcgctttggcagggtctttttccaaaagtttggcagcagcagcctcaacgccctcctgcgcttcgttgaaggttgtctccaactctgtctgagtggcacgcacgtcgtctatcatcaagtcatagcggggatataccatattggccacccaattgaaaatccagaaagcggagttccaggagaaagtgatgtaatcggcgccgtccacacgggtatagcatacgggaaccttgtccgtacagcaatatacgggcgtaaataccgtcatgttggcatcatccgtgccaaaccacagtactccaccgatagggtcgggcaactcggaacgcatctgtgccacgaatacgaaaccactctgctgggtggagatgggacgttcattgaagtattcctggtcacccaccttgaaagagagtggagaaaggcggtacggggtatgatacgggcctgcgccgaaatctttgctgatgtcgagaggagtaccttcataatggtcgcgcatggcgttcttcacatcctgcacggaaaccttgcggttgggcttcacaaacagaggcatcggagtgtccgtctcacccaatatataaggcaggaactcgttgccgcggtcggtaaacatattgaaatagctccatacgcgtgcctcgcaatagcgacgggcgccgaaatcgagcggagcataggcattggcaaagctgaaatccttgttcacaccgtcaaaatagcccttctcgcgtgcaaaggagatgacatcgggggagtacatacagttctccttgtcgttcatgttgaactgatgaatgcggctctggttggcatgagcggagatacaatcatcgggcacgcggacagccacccatacggcaccgcgcacaccgggtcccttgccaatcatctccataatccatatctcgttggggtcggcaatggtaaaggactcgccaccgctgtaatagccgtattcctgcaccaactccgtcatcaccttgatagcctcgcgagcggtgcgtgagcgttgcagaccgaggtaaatcaaactgccgtagtcgatgatgccggtggtatccaccagctcgggacgtccgccgaatgtcgtctcaccgatagtgagctggaactcattcatattgccgatgacattgtacgtctgacgcgcctgctctatctgcccaaggtatttgccggtgtcccactcgtgtatgtcaatcagcgtacctttcttgtgcataccggcaggataatgatacaactcgccgaacaaaccataagaatcggcagaataggaaacaatggtagaaccgtccgcagaagcgttcttgcccacgataagattggtgcaggccagcgcattcgccatggctgccacaacaaacaagacggaaagagtcagtcttttacttttcatacttctaaattataatgttactaaatatttcagtctttaccatacaaattcaaactgttcggtggtacggttgccacagccatccgtcaccgtcatctccaccacatgcttgccgcctttctccacatgtttcgggtcgagctcgcacaccaggttaccactgatggaattgggctttccaaacaaggcatacttcccgtcaatcgtaccccgataggtattgatgccggtttccttgtccttggccttgaagatgatttttcccgtacgtccccattgggcttggttcacgggagttatcaccggtggaaccgtatccaccgccacggtataagtccccaaatcccgtatacgcactttcatgacaccatcctcatacttaccgccgatgcggtattttccaccgcgcgccgttacgcccgccacataatatttggtcacatcctctaccggacgccggcgcaagccgatacgcaaatcgcaggcattgtgcataggaatacgggtatcgttcagttgataggtgaaagcgatgtcgccactatcagcccgcacggagtagttcagcaagacatcatcgtagagcattcctttcgggatgaccaattccagccccggttcctgcagatagttcaccttgtcccatttgagggcatatttctcacgacattccaccggagcaattatcgtcttctgtccctggactgtaaagcggactttagaggtatttcccagcgcatcgctcagtgtatagacaaatcggtaagggcgttcttcgttgatttccaccagtccgcgattgccgttggatacctgcagcatgcgaagacggttgcccggctctataaaagacttcatgtactgaccgtgtgtccacgaattgatatagcggttctcctcataggcaaagcggtctatcgtactgcggaagacttcctcaccgtccacttcgagaatcaccgtcttcacgccatatttattctgcactccgtccatatagtcgtaggcacggatgcctgcaccaatcagtccccaggcggtaatgggtttcgttggatgtgccggaaaagcccgtcgcgtctgcttgccctccaccactccttttcccggctgtggaaacagcatgataccttcggcacgcggggcagtcttgtctttcaccttgttcatgaagaaaggcagcgggtcgatatattcgtccgtagccgtctctatcatatccagatgcaggtgcggaccgaaagagtatccggtgtttccgctcaaagctattatctgaccggccttcacgggatattcatcgggttcgggagtaatttccacctcccaactttctttctcgtactgcaagtcttcaacccggcgggccacatcgcccacaaaggcactcaaatggcggtttatcgtcgaataaccattgtcataagccacatcgagcacatagcccgaaccgtgggtaacgcggatacgcgaaatatatccgtcggccagagcgcgtaccggcttgcctatggttccaccggtcttgaaatccagtccgccatgaaaatggttggcacgtatctcgccgaagttaccggagaaagtgatgggaaaatcaaaaggcgggatgaaggaaggcttgtctgtatcggtttcttgggcatagccgctttgcacactaccaataaagaacaaaagagagaaaaatatagaatatttcatattttgtacagtcaatattattttaaatgcatgcaaatataaaaagaatagttctctctacctacagaaagctacaattatcattgattaaaacatgcataaaaattctgttgaagaacatagatgcaccaataacacccaagccgggaaatcgctatattgcgccatgtttaaccccccaattaaaactttaaggttatgattatcggagtacctaaagaaatcaagaacaacgagaaccgcgtgggaatgacccctgccggagtagccgaattggtgaaaaaaggtcatacggtgtatgtgcaggccacagcaggcgtaaacagcggtttttccgacgatgactacatcgccgtaggtgcaaagactttaccgaccattgaagacacgtatgccgcagccgacatgattgtcaaggtaaaggaacctattgcaccggagtacaaactgattaaaaaggaacaagtggtatttacctatttccactttgcagccgataaattgctgaccgaagccatgattgaaagtggtgccgtctgcatcgcctacgaaaccgtggaaaaagaagaccgttcacttccgctgcttacccccatgagcgaggtggcaggacgtatggctacccaagtaggagcccgcttccttgaaaagccacaaggcggcaagggaaaactgatgggcggagtaacgggcgtacgtcccgcacgcgtacttatccttggaggtggtatcgtgggcaccaatgccgcacagatagctgccggaatgggtgccgaggtactgattgccgacatcaaccttccccgcctgcgctacctgagtgaagtgatgccgaaaaacgtaaagacactctattcttccacccataacatcaagatggaattgccgaacatcgacttggtaatcggttccgtcctcatccccggtgacaaggccccacacctcatcaccagcgaaatgctgaagatgatgaaacccggtacggtactcgtagacgtagccatcgaccagggcggttgtttcgaaacctcccaccccaccacgcacagcgaccctacctacattgtggacggaattgtacactacgccgttgccaatatccccggcgccgtacccttcacctccaccatggcactgacaaatgccaccctgccctacactgtttccctggcatgtaaaggctggagacaagcctgcaaggacgacccggctctggcgcaaggattgaacgtagtggaaggcaaagtaacatacaaagctgtagccgacgtcttcgggctgaaatatgaggcgattgagttataagttataagtgatgagtgatttgttggtattttcctttcagcatggtagcgcagcacaattaccaacaaatcactcatcactcataactcccccccaacaaagaatccttcttcctcgcatactcccaccacatagcgagcagtgtgatgcagaggttgaaaataaacggaaattccttggaattagtgtggaacaaggtctgaaagaagtctgtaatgaacggggacaatagaatcgccagataattcattaccattacaaaggccagtgccaaagttgttttttctggtatagccgtatctactgtctcgtcataaatcagcggttgaatgacaccatatcccaaaccaaccaacatacatcccggtattatcagccattctttaggcgaaatccatatcaaaagcaaacccgctgcaatggacaaaaggctgtaaaactttgtgtgtttccccatccacttcacgatatgccccaggaagaaacccggagccataatggcaaggaagaataaggagatcatcaatccggaatttccgctggagaagtgatgggcctccatcaaaaaaggcaagtcaaaagtaaccgccagcactacatacgtagtgacgccataaaacagcatcaactgtagcagatggcggacatggatgccgtatttaccgggaaccgcacgcttggattcctccggaacaacggtagctgtatcttctgctatctgcggctgaccggtatcccccttcaaatacccgacaagcagcagagaaatcaacggaagcagatataccacgaaaggcaagtgccagtttacctctgccagatacccagtcaccgccgttgccacaaccagcgtcacattggtgatggcagaactgtaaccaaactgcttcacccgatattcccccgtgaaatagcgtgaaaccagaccggtggacaacggaataatcacccccgatccgatgccaagcaaagcgctgaccaccatcaactgccacattttgtccgaaaaaagataaagtaccccactggtggcaaacatccaaagccccgctttcagcagacgcacaaagtcacgtttctcggccagcttgcccgccaacagcacaaaaggaattatcagcagcgaaggcagggaggtaagcatctgtatatccagttccgtggcatgtggaaaaatggtagtaagctgtcccaaaataggtgatacggccaatcccggcaaggaagtcaatgcagagactgaccaaatgccgacaagcgtgataagggggattgtaccccttccggtattgattttcatatagtagtatattaattaaatgaattatgtgggaacaacaaacctaccttcagaatgttcgttttttaagattttactacgctgccctttaataaacgccaaataatgcaaaaccccggaactttcatccgcaaaccccgttgttgtgggaaattcgacggggaaaagccccgccgcctaaacctttaaaaaacttattaatatggaagatttgaatttcagaaaaggagatgcaaaaactgaagtattcggttcaaaccgtatgttacaaccctcacccgtagaaaagattcccgacggacctactaccccggaaatcgcctatcagatggtgaaagacgagaccttcgcccaaacgcagcctcgcttgaatctggctacattcgtcactacctatatggacgaatatgcaaccaagctgatgaacgaagccatcaacatcaactacattgacgagaccgaatatccgcgcatcgccgtaatgaacggtaaatgtatcaacatcgtggccaacctctggaactctcctgaaaaagaaacctggaaaaccggcgcacttgccatcggttcctcggaggcatgtatgctgggtggtgtggcagcctggttgcgctggcgcaagaaacgtcaggcgcaaggcaaaccgttcgacaaaccaaacttcgttatttcaaccggtttccaggtggtatgggaaaaattcgcccaattgtggcagattgaaatgcgtgaagtgcctttgacactggacaagaccacgctcgaccccgaagaagccttgaagatgtgtgatgagaacaccatctgtatcgtgcctatccaaggcgttacatggacaggactgaacgatgacgtcgaagcccttgacaaagccctcgatgcctacaatgcgaagaccggctacgacattcctatccacgtggatgccgccagcggtggtttcatcctcccgttcctctatcccgaaaagaaatgggacttccgtctgaagtgggtactctccatcagcgtcagcggacacaaattcggtctggtttatccgggtctgggctgggtttgctggaaaggcaaggaatatctgcccgaagaaatgtcattcagcgtaaactacctcggtgccaacatcactcaggtaggcctgaacttctcccgtcctgccgcacagattctgggtcaatattaccagttcatccgtttgggattccagggttacaaggaagtacagtacaactctctgaccatcgccaagtatatccatgacgaaatcggcaagatggctccgttcgtaaactattccgacgaggttgtgaacccgctgtttatctggtatttgaaaccggaatatgcaagagctgccaaatggactctgtatgacctgcaggacaagctgtcacaacacggttggatggtacccgcctatacactgccttcaaagctggaagactacgtcgtaatgcgcgtcgttgttcgccaaggattcagccgcgacatggcagacatgctgctgggtgacatcaagaatgccatcacggagctggagaaactggattacccgactcctacccgtatggcacaggaaaagaacctgccggtggaaaccaaaatattcaaccacggatgccgtactcataaaaaataaattaatttacgattaaacgatttacgatgtacgattagagtttctcttgatacggactacgtttaaaggagtaatttcaatcgtaaatcgtacatcgtctaatcgtacatcacaacgtgtttatggaaaagaaaatatcaatttcacaaataaaggaggttgcccaagaagcctacaatgaggtgaagggcagcacaggaggcaagaatgcggattatattccctaccttgccaacatagactccaaactattcggactcagcatctgcctgatgaacgggcagaccatcaatataggtgacacagactatcgtttcggtatagagtccgtctcgaaggtacacacagccatccttatcctgcgccaatacggtgcgcagaaagtgctggacatgataggtgccgatgccacgggactaccgttcaactccatcatcgccatcttgctggaaaacgaccacccttccactccattggtaaatgccggtgccatttccgcctgttccatggtacagccagtgggaaactccgacaagaaatgggatgccattgtacagaatgtcactgagctgtgcggctccgccccacaactcatcgacgaactgtacaaatcggaaacggctaccaacttcaacaaccgctccattgcctggctgctgaaaaactacaaccgcatctacgataatccggacatggctctcgacctctatactcgccagtgttctctcggcatcacggcccagcaactgggcattgccgcaggaaccatcgccaataacggtgtgaaccccgtcaccaaacaaacggtgttcgaagccagcctggcaccgaaaatcacgtcgatgatttctaccgtaggcttctacgagcattcgggcgactggatgtacaccgccggcataccggccaaaagcggtgtaggcggtggtgtaatggccgtattgcccggtgtcatgggagtatcggccttcgctcctcccctagacgaagcgggaaactccgtaaaggcccaatcggcaatcaagttcatcataaacaagctcggcctgggtgtattcaacggtgataacgtaacgattacagaataagtttctctttttagttatgagttataggttatgagttatttgttggtaggcaccgtaatcagcaaatgacttataactcataacttatgactttataatggacttcatcatgaaaatggctctatcagaatttgtattgcgggaaaaaggtatctatggcatactgcatgtcattatattgatactgtcgctatttttagttatcagcatctctgtcgacacgttcaaggggatccccttttacgaacagtcggtctacatgaaagtacagttgtggatatgcgccctgttcctggcagattttgtattggaatggttcctggcagagaagaagggtcactacgtggccacgcatttcattttcctgctggtagctataccctatcaaaacatcattgcctatatgggatggactttctcacccgagataacctatatgctgcgtttcatcccattggtgcggggtggttacgccatggctatcgtggtgggttggctgacgtacaaccgcgcatcgggactgttcgtttcctaccttaccatgttgctggccactgtctatttttccagtctggccttttatgtcatggagcatggtcccaatcctttagttaaaggatatggagacgccttatggtgggcatttatggatgtgacgacggtgggttccaatatcatagcagtcactcccaccggacgggtactgtccgtactgctggctgcgctgggcatgatgatgttccctatctttacagtgtatgtaacgagcctggtcgaacggcgcaataaggaaaaagaagagttctacaagaaagttgcacagaagcccgcgcccaaagccgacgcttcctgaatagttaaaaccggaactttcacttatccgttgggaacaactctccccaagtgttgttatagacgctgattttgaatatatttttcatctaaaaccttaacttatggcaaatattaaacaaacagtgaagctgggtgtatttaccctggcaatcatgaatgtgacggcagtagtatccctacgtggacttcctgccgaggccgtgtacggaatgagttcggccttctactacttatttgcagccattgtttttctgattccgacgtcacttgtcgccgcggaactggctgccatgtttcaagacaagcaaggcggtgtgttccgctgggtgggcgaagcctacggaaaaaaactgggcttccttgccatctgggtacaatggattgaaagtacaatctggtatcctaccgtattgacattcggtgccgtatccattgctttcatcggcatgaacgacgtacacgacatgtcactggccaataacaagtattactcgctcgttgttgtcctcatcatctactggctggctacgttcatctccatgaagggcatgagctgggtaggtaaagtggcaaaggtcggcggcctggtcgggactattatccctgccgcactgctgattatcctgggtattatctaccttgccaccggcggacactccaacctggatttccacagcagcttcttccccgacttgacgaacttcgacaacgtggtgcttgctgccagtatcttcctcttctatgccggtatggaaatgggcggtatccacgtaaaagacgtgaacaatccctccaagaattatccgaaggcagtgttcatcggtgcggccattacggttatcatcttcgtgctcggtactttctcactgggcatcatcatcccggccaaagacatcagtctgacacagagtctgcttgtaggcttcgataactatttccattacatccgcgcctcctggctgtcacccatcatcgccattgctctggcattcggggtgctggcaggtgtattgacatgggttgccggtccgtccaaaggtatctttgccgtaggaaaagcaggctacatgcctccgttcttccagaagacaaacaaactgggtgtacagaagaacatcctttatgtacaaggcggtgcagtaaccgtactgagccttctgttcgtagtcatgccttccgtacagagtttctaccagattctgtcacagttgaccgtagtcctctatcttatcatgtatatgctgatgttctccggagccatcgtactgcgttataagatgaagaagctgaaccgtccgttccgtatcggcaagaatggcaacggattgatgtggctcatcggtggtcttggtttctgcgggtcattgctggcattcgtattgagctttatcccacccagccagatttcaacaggcagcaacactgtatggttctccgtgctcatcatcggtgcgctgattgtagtcattgccccattcattatttatgcttccaagaaaccgtcctgggttgacccgaacagtagctttgaaccgttccattgggaagagcaacctgctgtgcagacagccggtaaaagtgcaacaaatatggctaccggtagcgccactgccagcagcaatggcacaagtaattccgccacaagtggaaatacggcaaaagacacaaccaatatccccaaaggataaaaggttataagttgaaactaaaaaaggaatatccccgaaatcaccgggaatattccttttttattgttatatgataccagaagagggaatattcagaaatccaattcctgcattctctcccacgcccttctgctctcctccaccaactcttgcatgaccgacgccacagactgcactccctttccatgcagcaaggcagatacctgccctatttccagttccccttcttccaagtcaccttcaaaaataccacgtttggcacggccacgccctaaaaggatacgaagttcttcctctgaagctcccacagcctcagcagcctctacggcgctgcgaaagttattgcgcaccagacgcaccggagccaatttcttcaaaagcagacgggtatccccttcttccaaatgcaagcagtaatccttaaatacctcgtttgcagaactctctgccgtcaaggcaaagcgtgtaccaatctgcacaccttccgcacccagcacccgggcagccagcatggcctcacccgttgcaatgccaccggcggcaatcagcggaagtgtagtaactgcacgtacagctggtatcaggcacagggtggtagtctcctccctcccattgtgcccaccggcttcgaagccttcggcaactattgcatcaacacccgcctcttctgccttcacggcaaaacgcgaggacgaaacaacatgcaccaccgtgatgccacgctcgtgcaaccaaccagtccatttcttcgggctgccggcagatgtaaatacaatcttcactccctcgtcggccacaatctgcattatctcttctatctggggatacatcaagggaatattcacaccaaaagcatgatgcgtagcctcacggcatttcctgatatgctcccgcaacgtttcgggatgcatcgaacctgcgccgagcaagcccagccctcccgcattgcttacagcagcagcaagtctccagccgctacaccacaccataccaccttgaattatcggatatcttattccaaatagagaagtcactctgttcattattactttttttaaaggtttactaatgaaaacaagaagaggagaaagaaagttcaaaatttgacaaaaagtgataaattactgttgttccaaaacagttatcgaatctccatacgccttcaatacttccagcgtacgggcacggcgcttgcggcctttgaaattccaaaactcacgggtaaaaggtgtcatcaggtctaaaccggaaattccaccgccactggcaccctgccaaccgcccacagccatattattggcccgctccgtcacccggtaacgcaaaccggttgcttcaatctgctccaccgtctcacgcggaccggcatcaaacggatgtttagcccagttcgtaggaatcatcagaatcttaagcgcatagaattcatctcctcgccaagtatccttgtctaccttgatttttttctgataaatggggtcccaattatatttggtattggctgtataaggacgtaaggtaagcaccacttttttctcgggcgctttcggcatgacgggcaatgaattatcaaaatccatccacgacttgtccatcaccgctttcggagtacccagagaattgttcatttccaattcctgcaatacctccggattcagttttacctccccctcgcccttcagcaaccggttcagcctcaacgagtcctgaggggtccagttttgggcatagcaagggaaggctactgcacagagcagcccccaaacaagtatagatatcttcacctgacagttttgattacttaatccctaaaaacatttcaccaccacatatatccgctgccacaaagcggttcgtcatagcagggatcaatcgtccacatagtccgtggatacttacgggtttcccaccagcggcggtagcgcgaagcggcatccagcacctcttcgtccgaaaggaaatagataccttcataattctccgcatccgtatgtaccatcttgcatcccatcgaagcattgttcccgaggcggatagtctctaccgtccacaggatgcattcgcccaaacgcagcttgccacctgccgaataggataccggagccagggggaaagagggaatgaccgtcaagtcctcggcatacttcagcaattcctctatatcttcggaagtgaacttgggcatgttactcaatccatccggactttgggtagaatatttgccagccttcaactgcttgacaaacaagtctacatccggatggttgtagtccaacgtttctttgctgcaagagcccaaagagagaacagaaagagtaaagaatacgagcagcatagtctgcccgaatatatgtaatttattgtatagagtcttcatatttgtatggtatttaagattaataagtcatgcgcacgccgcacaacagattcagattggtgggccgttctgtacgcaaggttcttgtctgcgagtccgtatcgaaatgatgggatacagacggctctgcaaacaaggcaaaacggttgttcattttatagcgtacccctactccggcagcaaccgacaactgtaccggctctgcaccgaaaccattgtccggagcacctgcaatgcatttctcggctgctccacctaccatagcatagaaatccactttcggcgtactggccagcatcatgttcagccttaccggaattcccagcgtatgcaacgtatggtcaccatccaagcaattatactgaagaccggcttccaaggagaaatgcttgttcaaacaacgttccacgcttaccccggccgtgaacggcatatggaaattccctttcggcagggaagtgccgatgcctgctttcaatgcccaattacggggcttagatggcgatacagccacagactttgccggttcttcctcagaagatggcagcattctatctatatcagcatccttatggccaggatttgaatggtagttcccgtttccggccggagttccgttactgtaataaccgtttcccggctgctgctggtttccgtacacccgttgggtaatccggatggaaacatggacagacatggattcatcctcatcggcctgcgccgtcaatcctgccggaatgccgttggcgggatgctgtgtaccgggcttttgtgccatggggttggcctgatggatagagggaaaactttcctgcaccacatccccgttcaagttaccttccggcgtcatggccgccacttgtgtaaaggcctccttgatttcctctttcggagagaaataccagaaagcggcagaagcagctcccagtacaaatacaacagaggcggctgcggctacgcggtgaaacctcggagaaagaaaaagctgcctcctgccttttgcggcaaccggtgacggcaagtcacgttgcaacccttcccagaagtcctcccgcactgtcatctctgcgccggcaagacgactgcggaacaaaccggttatttcatcattttctctcatattcagtatattctttaattctttttatcaacaaacacttagcacgatgcaactgcgaggtagacgaatgctctttgatgtggaggatttcggctatttccttgtgcgatttctcctcaaagacgtataagttgaatacagtacggcatccatcgggaagttccgccacgaacgccatcagcatttcttcggaaatacggcctccggtttcggcaatgcctgcttcatccggaatgtcgggcaattgttcctcattcaccaccagttggctgaaacgttgctgtttccgcaggtagtctatcgcctgcgtcaccattacccttgtcacccaggtattcaatgcacattcgccacggaaggtgaagtgggtgaaaattttgatgaagccatcgtgcaatacgtcatgggccgcatcgacatcgcccgtatagcggtaacataccgccagcatctgcttggagtagagggtgtataattcctttcgggcggaatcctttcctgcccggcagccctcaatcagttctatctcattttccaatgtcagtgctcgttttacggacgcctcttcgcgtcgtttgttagttagacgcagcatttttgaaaatgctgctgaattaaatataaaaagatgttaaagaacggagattacttatatttggctttcaatacttgaatctgcttggccagcctttcatccaattcatcaaattcatgccaatacagaaaaccgggaaccatgttgacgtaattgataaatttcttatactgcacaagaaacaaggcctggtcccgaagactgtcgtcaccatcaaaaacatgcgccaactccctggacatggcagcactcataagagcatctgttttcgttgcatagtaatcaccgacatccctctgtttcctgcccaactcaaaataagtctgcaatacatcctgcaacatacgtttgtccggtatatactgcatcaatgaagaacctttcagcacatccagcgcatctgtcctataagagaattcatccatattattgaaaagcttgccatacttccacagagtatctgtcggtatcttggatacatccatatcatgttccttcaacagcagactcatgtgtatgtcaatatccaacaagtgctttatattacggagctcctgcttattatattccaactcttccgttatcagctgcatcgtagcacgcacttccttttggcgggcgttctcggtaatccggtcgtttccccagaaagtgacaatgatgcccgcagccacaatactgaactgacggaaataatcacctatgcgccagctttttatcttatggttcaacctattaaagcttgtctttcccatatcttttcattctaaatgatactttttctcaagcgcttgtattgcctcgtctatacgttttcccacacgttctacatagtccggcgtaaaatagttccgcgctaccctgacaaagttccgtaccgacctgtccgacaagtaaatatcccacgcctcatatcctccacgatttatctggtccgtctgttcgtcagtcaatgccaaatggaaaggaaccataatttcgtccttcatatcgtaatagccattcatagtcgccctaaatccatccaatacctcatagattccggtcaactgcaacagtagctctttatctgaaatcttctgcatcaacatggagtttttaagtatatccaatgcattctgactataataaaaactgcggatatgccccataagaaagcggaactgtatcaatgaatcttccggtatcgtccgatgctttaagtcatgctccaccaataagctggaaagacgttcatcctctctaaactctgaaacgatactcttataattttcccggttacttttcagttcatccctaatcagcgacatggtggcttgaatatcctttttctcggagttttgagtaaccaactcactaccgacaaaagtaatcagtacgccaatcaccacaatggaagtctgccggatgtagtctcccacttgccaatctttgacagttgtttttactttattccatgttatgtttttcatatcttcctacgctattatccattactctgaaacacatcatccgttatagccaaacgcatcatctatccgtccccaacagaccatctgtttcaccccaatacaccatctgttttttcaggagtcattactctgctggttatcaagagaaagcctctcataagtctgccgtaatgcagcattctttatgagaggctttccttattattctgcaataatgctttccgcctttgtcaacatgctttaaagctcatgtccaatcctttcacagagtgcgtcaaagctcctacggaaataaaatccacaccgcattcggcatagtcgcggagcgtatcaaacgtgatgccgccggaagattccgtttcatagcggccgcctaccatctctacggccttctttgtcattgccggcgtaaagttgtcgaacatgatacggtctacaccacccaaatcgagcacttgctgcaattcgtcgaagttgcgcacttctatttctatcttgaggtccttgccttttcccttgcaatattccttcgcacggttgatggccttgtcgatgcctcccgcaaagtccacatggttgtctttcagcaaaatcatatcgaacaagccgatacggtggtttacgccgccaccgattttcactgccattttctcgaggatacgcatgcccggagtagtcttgcgggtatcaagtacacgggtattcgtacctttcagttgctcggcatacttatgtgtcatggtggcaatgccactcatgcgctgcatgatgttcagcatcagacgctccgtttgcaacaaagactgtatcttgccttccacaatcatggccacatcgcccggctttacggctgtaccatcattaatgaacacttccaccttcatggtaggatcgaaacggcggaacacctcctttgctatctcgataccggccaggatgcccggttcttttatcaacagtttggatttgcccattgccgtagcaggaatgcacgaaagggttgtatggtctccatcgcctatatcttcggcgaaagccaggtctatcagcctgtcaatcaattcttcttccttattcatctgttttatctatccttatttgatgtatgacatatttgttctgtacttttctgaagaaacaattcacccgaaagtttccatttgcggtcatcaaggtaccgatgacgaaaccggactcatcgcgcttcccctgatggttcacattaaaactgccgaccttgtggttggagaagaaagcagccattgtgccctctgccgtccgcttgtcggcgtgggtcgacttattctgaatgattaaatcgaccttgtcacccagatacttgttgagctcctgagagtttccttccttgaaggctccaatcactccctcgggaacattctgagccagcagcacagacgtccaactgaagagaccggtcaacaaaaagattacccgttttttcattttcacaagtatttatgataggcaaaggtaagcatttgtctcaaaatacaataaaaaaatgctaaatttgtgcgctaatcaaaacagaaccagtatgaaaactactctgctcgttgtaggacgaactgtagaacaacactttataacagccatcaacgactatgtgcaacgtaccaagcgttatctctcattcgagatggaagtcatccccgaactgaaaaacaccaagagtctctccatggaagtgcagaaggaaaaggaaggggaactgatattgaaagctctccagccgggagatgtggtcgtactgctggacgaaggtggaaaagaaatgcgctccatagagtttgcagactatatgaagcgcaagatgaataccgtgaacaaacggctggtatttattatcggaggcccttacggattctcccccaaagtgtacgaagcggcacacgagaagatgtccctctcacgcatgaccttttcccatcagatggtgcgcctcatctttgtggagcaactctaccgggcgatgaccatactgaacggggggccgtatcatcatgaatgatgaatttcagctccgcgacacctggaatcccttatccgagagtgacatttctacgaacctggctctcggattcggtacattcagcgtcaaggtctcacggatgcgcagggctgcctgcggatccttagccaccatatacagatagcctcccccaccggctcccggcagtttatatcctaaggtatagtcttttatctgacggatgatgtcctctacggcaggaggatttgttccactgtccagtgccttcttctgcatccatgtcttgcctaccagtgttccgaaactcttgaagtcattccgttgaatggcttcggccatatccaaggcatgtgctttcatctcttctaataaccccaggtgcagggaagagttgaggaacatggagcgtactatttctgcaaggatgcccttggctgtacgcgtaatgcccgtataatacagcagatggcaatcgcggtattccggatgggtaaacaaatgctcgggcaaccagcgtaccaatggctgctgggcaaatccagcctccgtctgcaacagtttgatgccttgcagtaccccaccgtattggtcttgccaaccgccaccggtcgtcagcaactgttccagggcaagcgtacggcggcatatttcgttcttatcccacatcagtccgcaaaagtcactcaatgaccccaagacagtagaagccaaaatggagcttgtgcccagaccggaacctgcaggtatggcagaaagcaatgtaatctctatacctgtgccgaaggcttccagttgtttttccagcgaaggataagccgtttctgaaaaagccggaacaaacccggccagcgccaatgctgctttgggaatggaaaagggggaacctatcatgcaataggattgcaattcctcaaaagtattcaccacctccatggctcccatatcaatggagcgcaacacgatgcgatgctccgcgcaaggtttgatgtacacttgtaaaggcggctgcccgttcagttcaatggcaatattcaccacactcccaccggcaaacaaggagtaaggcggagtgtccgtccatcctcccgccatatctatgcgtacggggctacgcccccatacaatctggtcactatacacattcaggcgaggactactcttgcgttcatacaaatcagtcagcaatccttcgcgcaacaagttgaatgcggcctgctcgtctgccttgaagtcccttccgtccagcttctcaatctgtgcacgcagcatccggttatggatacgctgcatcagcgaggcatctgtcggcaacacttccggcttgtcaatgccgaatttatggaattcaccggccacatccatcaagtcgagttgatagaatacactctttgcatggttgcgtgccagcacttcccagtttcctttgcagaagctctcccgctgtgcatacagcagacgcaagtcggcttgtgctgaaatttcgtcggcggacaaccgacgactttccagccagacagcctttccttccgtcaagcccggttcggaaaccatccatcgaagcactgtccccatctgctctttatcttccacaaccgggaagatggcagcagcctgcaggtcctcttttctgccggtgatgtcttccaccgacaattcccgttcagccagccattccgaaaacgacattccaaagaacagtgtcttttcatcccgaatatcccccttaaaagtatcgtcaaaaccataggggcgtactgcccagcgctggtcggcaagcggaactatatcaatgcagataccgtctggaatggtcagcctccagtcattcttgggaacacccgtgataatctgccgtgcccccagccgccaagaagccccaacaaagctattttcaatccaaagactgtcgttcttcggagtaagggggagatgcacttctgcattctgcacaaagatggccggattgggcttcaacttccggtgcataatctggcgctggtcgtagaccttattctgtaaggtgacggttgaagacaacagttcgcggcttgttccataatggtagaattcgcctccgggcaaaggcaatatggcgacggagaggctattcagctcttcatcctcaatacggggatgatttcctaaggacaagccaaagtcagcatacaagtcatagtatttcaagtcggaatatggcgtatccacgtccaaagccccatctgccttctgcgaacgtttcatcagcaagtcaacggcccggtcgctcaatagccagatgccgatatccattaaaaagagatgtgtcttggagaggttttccaattcttccagagagggtttctgaagcatgaaatccaaggattccggttgattccggtccgagataaacacaccatgatgtgtggcgagcaacgggtctacccacagtccatagcacaccacatctgcatcgggaatctcttgaagcggcttttccgcacggatatatacgtcaccactggcaatcagcgtacgcagtctttcgggagcccgctccattatcttttcgtaaagtgggagttgaagggataataaattctgtcccagtttttgtccacgcgcccagcgaaacaccggaatcggggtcaatatcttgcccgacggtgcatatcccggtaaacgacggctttgtcctccggcatgcagcagaatacgcttctctattggaatgcttttctctgttggaatgcacttttctgttggaatacgctcctccgtccaatacttcctatcccgttccttctgccattctctcaagagccaggtagttcccccacccgagccaagtttcattcccaccgggtcggaagtacaaaaccattccgtacggtctacattttccagttcatagaatgccgacaccagattaggcggcaaagacaataatttctgcatatcaatcgctgtattgcttactatttgacagcaaagtaaaataatattaggcaattgacatagaaagtttcaatttatttctttggtatcaagcttgtgttcctttacggaaatacgactgagtatataggcgattcataaagaatggcttttccaatcaagttcatttttaaaacagagaaaagaattgattaagagttaagaaattgtcgaaagagacattattaaagattcttagtaaatttctcagtaataaaagatagaaatacacacgaacagatacaaacaatttatagcatgcaatacacgatactaacaacatgtcgtgcaagaagttaataacgtgtcctacaaaaaacaaatatcgtgtccgcaggatattaacttcctgcaaacacgatattaattcgcttttacacaaaactatacgaggctaactacctgctgcaacaaccccgacaattcgaaagtagcattcttaatatccgaaatccggttcttgccttctgtcgtaagagaaaaacgcatctgacgcttatcttccttacctatcagacgggtaatgagcttctttccctcgacagagcgaatgacctttgaagtgttggaggcagacaaacccagtgcctcggctatctcactggaggtaagcttaggagtattgagcagcgtgcacaacagcattccttcattcagcgataaatcatacatctgcgtaaactgcacctcgaactcggcaatagcccgataaacatcacggattttacataaagtctccatatcttgtcctcctatataaataagttcacatttgccttgtccgcacgttccatataggtagccacgccgccgatggttacttcatccagaagttcttcgtgctggatgcccatcatatccatagacatctggcaagcaatgaattccactccctgcgccaatgcctgcgagcgcaacgactccaaagaatccactcccttgcgcttcatcaagaagcgcatcatgcggctgcccatgccaaacatattcatctgcgacaacttcagtttcaaagagctggacggcagcatcatgccgaacatcttgccgaagaagtccttctgcacactgggtttctgcactttcttcaagacgttcagtccccagaaggtgaagaaaatggttactttctgtcccgttgccgctgctccgtttgctagtacgaaggttgccagcgctttgtccaggtcgtcactgaacagaatcagcgtctttcccctacccccggctgcggaaacattggaagcagatgtacaagccggagcacctttctcgatgactaccgtatagcgtcctttctcgtcatgcttctctatcaatttatttcccgtcgtatcacaccaggcagaagcatcgcgtgcaaaaccggcatcggttgccacaatctccacacgctcgcccacagcaatgctatccatcgcctttttcacctgcatgataggtcccggacattgcaaaccgcaagcatttatcttcaacgtttccttcttggacactgatgcatccgcaggaacatcatcagtagcagcctctaccgaagaagaagagccgccgcctgccggagcagatggagacggcagaggtgctgttgccgtggagtaggtcttataaccacctatcagattgcgcacattgcgatagccgcgccccatcaggatgcgcagggacagataaccgcgcagacccacagcacagaaaagcactaccggcttgtctgtaggtatctctgccaaatgctcgcgcatttcgtccaacggaatattgacggctcccggaatggtgccgaaagagaattcctcgggcgtacgggtatctatcagcatcactttatccttctcttctaccagctcgcgccaagagatgacaggcatagcaccgctgataacgttcgatgctacatagccaccaatagcgatggggtctttggccgaggaaaaaggaggcgcatacgtgtgctccgtctccatcaaatcgtagactgtgccaccccgcttgatgagtccggcaatctggtcgattcgcttgtccactccctcgtaaccgatacattgcgcaccatagagtttaccggttttgggatggaaagtcagtttcaaggtcaaaggtagggcatccggatagtaaccggcatgagatgccgagtgagtcaccgagctttgatattccacgccccactgcttcaagcgtttggctgcaaggcccgtagaggctaccgtcatgtcgaatactttggcaatggaggtgccgatagctccttcgtaggaaacagtattgccaaacaccatattatcagcaacgatacgtccctggcggttggcaggatttgccagataattgagccagggctttccggtcagcggatgaggatattcgatggcatcgcccacagcatagatgtctttttcggaagtctccaagtgttcgtctacccagataccgcccatctcgcccagtttcaggccggcttgttgcgccaatgcagtggcaggacgcacaccgatggagagtaacaccatatcggcaggaatggcctttccgcttttcaggaatacggtgattccgttgtccgtacgcttgaaatgggttactccttcttccagatagagagagacgcctttctgcaacagatgctgatgaataggtgccgccatagagaagtcgataggcgccatcacctgattacccatttcgactacagacacatgaacaccggcatgatgcaggttctccgccatttccaatccgatgaaaccggcgcctaccaccacggcgcgtttcacctgcttgtccgagatataagccttgatatggtcggtatcttctacattgcgcaacgtgaagatgccttcggaattaatgccttccaaggggggcttcacggggttggcaccgggagaaagcaaaagtttgtcatagctttcgtcgtactccttgccttccgcattgcgtatggtaacggtcttgtttttgggatggatggcgattacttcattctgcacacgcacatcaatgcggaagcgcttgccgaaagattcgggtgtctgcaccagcagcttctcgcgctctgctatcactccgcctatataataaggtaaaccacaattagcgtacgagatgtaagggcctttctccaataagagaatttcagccatttcgtccactcttcttagtcgggcggctgccgtggctccacctgctacaccgccaatgattacatatttcataattctttgttttttaaagtttgacgatgcaaagaaaagaattattttcaataaaacataatttccataagaaaatattgttaaataactaattttcaaccctcaaatccgcaactacgcgcctaatatgatacagaagcgaaaagaatctgcatcgttagtaaaaagggggcacagtgcatcgaatgtcaccataaagacatataaatgccccttaccccaccatgcgacttgaggcaatacgcaaaatcacgactataagttgtcggtgttatccaaagtcattctggaacacattggcataagcattgttgcatgaatagatattcagcacatacttccttgatgtcctgacccatttggctggcacagagatgaacttaaagacaaacgtcttgatgcggcttgttgctttgagtccgaacctcttcacgtcaagcctcgccatgatgaatttatagaagttgcgtatgagtgccataagcagaagaaacaccgtgttttctcccataaaggattttggaagcctgttccagccgaatccgttattcatatcatcgaagatgcgttccttccctccacggaggttatagaattcgacaatctctttctcggaagactcgtagtcatttgtaaggatgcagcggtaggtgtattctccttcccacaggtcgagttcgccgtctatccgcttctgtctttgaatcacaagacggtatgccttccctttccatttctcgatgagaatggaggccagctcaaactcaatgccgcccaattccactttcttccaacctctgagggcaaagatgtcattgtagagcgaactgcatcggttagcacggatatagaaggtcttgcagtgtttagcaatctcttccactatctcttcagaacacgagccgcaatcagctctgaaacggttgataataagcttgttttgttcaaacctttcaaagaacctcttcagcgtgtccttctggtggaaacggacatttgtgttgccgtcgctgttctcaatgccgacaatcaagttgccaataaccgccacgccagggcgataaccaaggaacttcttgtatgtaggcttcgcatcaaacttctcagcctctatgaactggtggtcgaagtcaacgtcatacccctcgccctctttcagctgccctgtggacaataggcaattgaggagcagtgtattcagcttgtctgccgtgttgaagtcgtaggtcttgccagtgtcggatgtgtaggaaatgttatcctgggtcagttcctttatggctctaagaatcgtgtcggcactgcatgtgcgaagtgtcggatgaagcgaaaggtggtacatcagatgagtggtgacatcctcgatgcatgagccgccacaaaaataaacgctcataagcgaacggatgatttcgctgtattgataaccatacagcctgcatctcataccgagggttgagtcgattacagatgagagtctggagtcaaattgctccattattgaaaatattcctccaaaaggagtgagtttctcggatttaattgctacctttgccatgtctgtcgggtttgatacatattttgatttgcaacactaagataggtgaaaaatctgacatggcaaattcctgagcaactttttgttgctcaggtacttaaaaagttatatttgtaatagtgttgcggaattaaggtcaacaagaataggcataaaaagaaggggtaaaagtactcttaatagatatattttaggcgcggattacgcgaagttcacggattcgattaactaatccgcgtaattcgcgtaatccgcgcctaaaaatagattatgagaaagcactcatatactttttccggacacagccttatacaatatgtaactttgaatagccttaccaacccagcttggaaagaccggcagacttataccaatccgtggaacgaaacgctgcggcagccgcctgtttagacaaagacggtatataatgggaaacaccgcttgaaccttccatagaaaacatgccggtataaccagaatagttcttggaagtagtctcccaatagggtactgccatatcataaacctgcttccaagtagcaaagccagaagcatcagttaactgttgcatcagctggacaaaatcataataaccaatattactactttcacgacgttggtcgtaattaaaaacaagagaacgcaattcctcactatcagcattctctgacaagacttgcttggtaatacttgccaaagactctaacactgaactctgtagcgcacaaacggaaacaccgcctgtccaattcgtattggatattccactccctccattataaattttcttgtaaggctcgtaataagcggcagctaccttcaacgccacttcaccgtccgaaaacaacgcaggaacaagtacatcatagcgtgcccccggtccaggtatttctgtaggtgaaccaatataataatcagtaaagttgcgcaaggcataagccacttcaatggactgcataaagcaggcatcgaacaagacaaaatcaaaatgaggaacagcatcagcagacaatattgtaaccaaatcttcaatattcatgtaatgagtgcccgaacctgtgtcttgccctacccatctggtagaaggaagtggattaggaatccaaccatctccatgcgaccaataaatcaaaccatagctttcagctctgtattcactgtttttaaagacatcattaaagacttccaaagtctcagccacacccacagaattacgattttcataggtctttaccgttgtttcctgcaatttaccaccttcatttttcaactcaatgagacgtggagaagaatcagtatcaatataaactaataggcgcatattactactattgttcacttttgccatacccaatctcatttcctccaaatctaataaggctaaagaagacaaattattaagtgtaccacgatgatctgccgcaagatatgccagtaccgtgcggctaccagcaacgggaggttccggtatgggatcctcgttttcgcatgctgtcagtaaaaccgagcagcacatccacaatagtagaaagagtctggatttcatcatatgtatattccctaaattattcctgcggttttgtaaatgtgaaagcttcaggcttcaccacctgcaaaaccatattcttactcttcttatacttaccttttacctttacagcctctttttccaactttttcctgttttcagagaaataaatcatacaagtatagtccggcttcttcagattgtactccagatagttcttgagctggtaagtgtataaatcacgcttgggcaagaatccattcttatccagctctacgctgtccaatacctggatgtctgtataatatacgatggagtcattgaaagaagccgccacaccaaaagcatatacagccttttccttatctttcattgtaaaagccgagcacaacgcaaaaaccaaagctacggcacaaagtatacgaacgtatttcattgagttatgagttataagttatgaattatcaatgggggcaaagatataaaaaaaaccgcacgcctactaaagacgtacggttttttaattccttctatttgtcggaaactgatatttcttatttatcccaaataagatttgagcaatttactacgattactttgtcttaatcttctgattgctttttccttaatctgacgcacacgctcacgggtcaagccgaatttgtcgccgatttcctctaatgtcatttcctgctgtccgataccgaaaaacatctgtatgatttctttttccctatcggttaacgtagaaagagctctatcaatttccctcgcaagagactcgttcaccaaagagcggtcggccataggggagtcgtcgttgaccagtacatcgagcaagctgttgtcctctccttctacaaaaggtgcgtccaccgaaatgtgacggccggacaccttcagcgtatcagagattttgtcaacagggatttccagttcatcggcaagctcttcaggagacggacgacgttcgttttcctgctcgaacttggagaaggccttgctgattttattcagcgaacctacctggttcaacggaagacgtacaatacgcgactgctctgccaaagcctgcagaatggactgacgtatccaccatactgcataactgatgaacttgaaaccacgtgtttcatcgaacttttcggcagccttgatcagtcctaaattaccctcgttaatcaagtcgggcaaactcaaaccttggttttggtactgcttggccacagatacaacgaaacgcagattggcacgtgtcaatttctccagtgcaacacggtcacccttgcggatgcgctgagcgagctccacttcctcttcaacagtaatgaggtcttcgcgaccgatttcctgcaaatacttgtcaagagaagcgctctctctgttagtgatactttttgtaattttaagttgtctcattcttataatacagatttgggttgcaaaggtacgacaaattattttgttacaataatttcatcccaactttttcaccttatttatatcttatcctatataacaaaaaggatgccggtatgtattgtaccgacaccccctttttcgctattgttagctaatattacaatcttcttacctaactatccctattttttattcttgagtcaaatcaacggcatacattgcacgttttcctgacgggaacataccggtgatgaacaaaccttgctcaggagactttcttgcctctttcatcgccttttccaaatcgtccaccgtcttcatcggcactccgttggctttcagaatgatgaagcccttgcggatacctgcatcggccatcttgccattggtaaccccggtaacttccagaccgtaacccaggttcaactgcttcttcagctcggaagatacgggcttgaaggctgcacccaagatttccattccggcatccttcactaccttcgtagtgccttgctcattcttcagcgtgatttcgaattccttttccttcttgtcacgaaccactgttaccttcactttgtcgcccggacggtgttttgccagcatttcctgcaaatccgagaacttgtgaatcttcttgccgttcaatgctatgattacatcattttccttcaagatgccggcagcggaaccaccttcaacaacttcggccacatagataccctctttcacaccaagttcgtcggccttcttcttcagttcttcggtccagcgttcgtccatctgcaggtctgtgctcaaatcactacccttgatgccaaggagcgcgcgctgcacggtaccaaactgtttcaagtcggctaccacctttgtcataatgctggtagggatggcaaaaccatagccggaataagcacccgtgggtgagtaaagcatggcattgataccaaccagctcgcctttggcattcaccaacgcaccaccactattaccttggttgatggcagcatccgtctgaatgaaagactggatgtttgcagcttgtccattggaggcagaagagccaatggaacgggcttttgcactgacgataccagctgttacggtagagttcaggttgaacggattacctactgccaatacccattctcccaccttcaactggtcggagtcaccaaccggaattgtcgggaagtcatccccttcaatcttaatcaatgccaagtccgtgctggggtcagtaccgatgatgcgtcctttcagctcacggtcgtcattcagtttcacagtgatttcatcagcaccttccaccacgtgattgttcgtcacaatatatccgtctttggagatgatgacacccgaaccgaaacctacacgcggctgggtctgtatctggcgctggcgtccacgaccgtctccaaagaagaagtcaaaaatatccggctgttcttgcaccgtctgagtcttgctcaactgagtggcacgtatatgcactacagcatggagcgaactctccgctgcttgtgtcaaatccacaggctgggcatccgttgcatggaaagccgccggtagcagattattggggttctgttggaacaactcgctgaatgcggcaggcttttccttattcagcatcttataagtggtcaatccagccactccagagctcaggagcacgatagctgcaactccaaggatgttttttgttgtctgtttcatactattcttcctattctttaaattgttaatattcaagtttcgtttaacattacgacgttaaaataacgacaaaaaacgttcagttattccgcttgtcactcttttttgttctcttttaacagaggatatttagggcttaacagcggttaacggcaaagactgacaaattagcatttatgtacgattgctgactgttaaagaactgacagatagggcataaaaagacgcatcacccgttgcggccgaaacggatgatgcatttggggtaaacagatgatgcgtttataccaaacagatgatgtgttcgggctgaacgcatcatctgtttttagagggcagatagtaccttaataattcaagtaatcaatgtccatgtggtagtcccactgcgggaagtagaggttacctccctcccactccacctcgccacgctggaagtcgacggtctcgctgcggggatactgcttttcgggctgtagcggcatgccgtaatcagtgttcacaatcatgcgccaagagtctataccacccaggaagaaatattcttcgtcggcattgcgagcaaaggcaggaatgccgaatgactggtcggcaggcacccaacccacaccctcaaaatagacttctgcccaatcgtgcagattccatgcacggggatgcatcatgaagccgctctggaaatgtgcgggaattccactgatgcggcaaagcgtaatgaacagcaggctgacttggccacagtctccgtgacggttgtccaacacatattccgggatattctcaatggtggaatattcgcgtgcagaagcccacgggaagttgtcattcacccaacggaagatacgtttggctttcaagtaggggttggtttcaccggctgtcaatttggcagcaagttcgcgcaagcgtggggaaaagacgatatgcttctcacgctcggcagtatattccttataaagggcggtcgtcgtatcatagggctgcacgtcttccggcttcagattatgccattcgccgttggcggtaaactcaaaggtttcggagaatacggtcggttcgccttcgacagcacgtttctccatgtacaatgtactgtgacggcactcgggcgacgaaaaggtgtattgcggttcactggccgaaatgaactcgacatcctgctgccgagcctggtcctgacggggatagggcaaccagcaacggatgattttcccggcaggcacggcattggtatccacggtcaacgtgtaggtgacgcgcatgcgcttcggcgcaacaatggccttgccctccttcttcacagcagaaatgatttcgggcaggttctccatattcactttctcgctgccactcggcgaagaaccttccttggctatcttgatgtcatagcaagtggagtccacacgaaacagattaggtccggcattacggaaatagcgtttctctccatccagcatcatgcactccaaagctttggaagcttcccactggcgcatctgctcatcggtcacgtcgggaatatacttgcggatatagtccttcacctgggattccgtcatacagaaatccgtaagcagacgttggtgcaggtcgtcctcccaattatagggcttgctctcggacttcgtgctgcatgcagaagctatcacaaacagagcgacggtatacaatagctttctcataacttcaccactccaatacccggcaaatcgggcaacgttatcttacctttcacaacctccatacccttgaaacggtcgttcgcaatcagcagactaccgtctaagtcggcaaagtccactgccggagagaattgagaggcagcggtaatggcacaagaggtctcggtcatacagcctaccatcactttcatgtccaatgcacgtgccaaagtcaccatcttccaggcttcgcgcataccggtacacttcatcagcttgatgttgatgcccgtaaaggcgcccttcaagcctgccacatccttcagacgctgaatggactcatcggcaaatatgggtaacgggctttgctgggcgacccatgcgatatcgtccaattgttccttgggcatcggttgctctatcatgacaattcctttttcgtgcagccaatgtatcatatcgagcgcatgatgtttgtctttccagccctggttggcatcaatggcaatcggaaggtctgtcaccgaacggatggtctctatcatttctttgtcgttctcccgccccagcttcactttaaggatattgaaccggtcggcacactctttcgtcttttcacgcaccacgtcggccgtatcaatgccgatggtgaaagttgtagagggagtcttttccttgtccaaaccccatatcttataccaaggggcttgcaacagtttgcccacaaggtcgtgcaaggcgatgtccacagcagttttagcagcggaatcccctgccgagaggctgtctatataagccagtatatcttccagctgaaaggggtctgagaattggccgatgacatcctgcaccttcttcagaaaagccaatacactgtccatcgtgcccagttcgtgttgcaggtacgggggcatggaggcttcaccataaccgataatgccatcatattctatctcgacctgaacgtcgggagtggtagtacgcgagtaggtggccactgtaaagacatggcgcaatttcagttcataggggaagaaacgcagtttcattttgggggttacacctgccctactgttcacgttgaacaaggaaggagcgtcatttcctccggcaaatacatgattgattgccatgcctgagccgagtgcggcaaaagcggcggttttcaggaaatctcttctgtttgacataattgtgtgtgtattaaatgtgccaatatgctaatgtgccaatatgccaatgggctgcgctatatatatactacgtcatgtttgcaccgtcacgccgaggtcattggcatattggcacattagcacattattacattgaataaaatggattcgtttccgttgtattgagcgacgcctccttgtttatataaggtaacacgcgcgtagcgaacaacagtctaccgaggttgtattcatcgaacagctcgtcgtcggggctgaagctattgacgcgcacatcgccttgcgaatggatgaaacgcttgttgccgatatacatgccgacatgtaccacacgttccttgcgttccggcgtcgccttgcgcccgaagaaaatcaaatcgcccggctggaggttactgaaatcaggagcgatatcgatatgctcgcccacgtatgcctgctgggaagcatcccgcggaatgatgatgtcgtgcatgaaaagaacggtgcgcatgaagccgctacaatccacccctttggaggaagtgccagcccaaagataagggatgcccatcatgctatgcgccgtggctataatgctggcggcatcctgcttcaaggtggcacgccatttcttctcaggcatggagatggatttggagatatatccctgacggccgtcgggataagccaccttataaaaggcaccttttgtcccctcccacttcaggcggtttcctgcagcaacatcagagacggtctgcgatgcctggctgggctgtgagtagacaaagccataatgcgaagtcaccactattttctctgcattgttccaagcggtcagctcttcccgcgtgacgggatgtatgcctactcggtgtacccatgcaatgtagttgtccggtgtctggatacggtaccagccgtcgcgctgcaacacccgcaccggcatacccatcaagccttgcgtcatcatttctgaagagaaatccggggctacccgaagattgcacacagacacattgacaatgccatacgtcttgccttcaagtccggcctcatccggaagcacttgcagacaatccatcaccgcatatcctttctttgccaaaccatccagcaaagccgtctttgcctctgccgaagtggtgacaccacgcaacatcacattctttccggagaaagagtaatccacatcgaacaaagccacgcgcttgtccggtgcaagcttttgtttcaaactgtcagcgagttgcgccacttctgcaggtattgtacggtcacccacttccgaagcgacagcaaaaagcgggattaacagaaataaagaaaaaagagaggataactttttcattggccaaaaggatttgggggttattactaatagcaaagctacgaatttattccgaaatagatacatgtttttaagataattaagggtaaagaatgaagaatgaaggattcatccgtactgcatccgcacactgcacaacaaattcttcatccttcattcttcattcttcattaatattccgtatctttgtaccctataaagcagttggtcggtctgtcgcttgcgcctcgtgcgtatgaggaaagtccgggcaacacagagcgtcccacttcctaacagaaagctgtccgtgagggtagagtaacgtagaagaaaataaccgccgtcgcccttgggctacggtaagggtgagaaggtggggtaagagcctaccagtcttgtggcgacacaagggctgtgcgtcttgggagttgtaaggtcatgtaaaccgacgttatgagagttgctcgctccatgtcggagggtagaccgctaaagcttgtatggtgacatgcggctcagataaatgacagacacttctttaatggagaatggataatgaagaatggataattcctaattaggctttttcagaaacagaagaacagaacccggcttacagactgactgcttttttattgacaatggataatcgagataatagcatgaacaagcgtattgctgccctttggaaattcctcacctacgacatctggcgtattacggaagatgaagtcacgcgaacgaccttttccgtatacaatatcatcaagacgatttatctttgcatcaaccgcttcaccaaagaccggatagtaaacaaagcctcggcgctgacttacagtacgctgcttgccatcgtgcctattcttgccattttgtttgccatagcccgcggtttcggattcgataatctgatggaaagccagattgtcaacggtttcggcggtcctacggaaaccacggaagtcatcctgcaattcgtgaattcgtatttgtctcagaccaagagtggaatattcatcggagtgggtctgattatgttgctgtggacagtcctgaatctaatcaacaatatggaaatcaccttcaaccgcatctggcaggtgaaaaaggcgcgcagcatgtaccgcaaaataacggattacttctctatgcttctgctgatgcccattctgctggtggtgtccggtggtctttccatcttcatgagtacgatggtgaagaacctcgaagactttaccctgctggctcccgtcggcaagtttatggtgcgcctcatccccttcgtgctgacctggttcatgtttacagcactgtacgtctttatgccgaatacaaaggtcaagctgaaacacgcactcatatccggtattctggcaggtacggcacaccaggcattccaattcctttacatcagcagccagttgtgggtttcccgttacaatgccatctatggtagttttgccgcccttccgatgtttctgctatggttgcaggtatcctggaccatctgcctattcggtgccgaactgacctacgccggacagaatatccggaacttcagcttcgacaaggatgcgcgcaatatcagccggcgctaccgcgattttatctccatcctgataatgtctctcatagccaagcgctttgaacaagacgcccagccctatacagccgaagagatatccgaagagtgccagattcccatccggctgacacacgaaaccctttatgaattgcaggaaatcaacctcctacatgaagtggtgaccgatgaaaagagtgaagacatcgcttaccagccttccatggatatcaacaaaatgaatgtggccctcctactggacaaactggacacgcacggctcagaagatttcaaaattgataaagaaaatgaattcaacaaccaatggggagcattgctgaaggcacgggaggaatactacaagaatgcaagcaaggtgctgctgaaggatttgtaagcacgcggaagtctttccggaaactccgtatctgctttctttttgattattttttagacgcggatgacgcggattggaatattaaaaaaatccgcgtcatctgcgtcatctgtgtctaaaaagtaaatcaccgatatttctcaggctccacggcacgagtcatatcataggcacggtcactctgacgggatgccactaattgcaggaaatcgtccatagtgccgttaccttatttatattgtatcatgcggctgatgtacttaccaatgatatcgaactccagattcaccacactgcccactttgaaagcatggaaattggtatgctcaaaggtgtaaggaataatggccacctggaaagtatcgtcggtgggattgcacacggtcaggctgacaccattgaccgttaccgagcctttgtctaccgtgatgtagccgcgctttgccatctccttgtcaaaagcataccggaaagtaaagtaatagcttccttccgcatcctttatatcgatgcaagtggcagtctggtccacatgtccttgaacgatatggccatccagccggccgttcatcatcatactacgctccacattcacttcatctcccacctgcaacaagccaagattggaacggtccagcgtttccttcatggccgtcacggtataggtatcatctgtcagactgactactgtaaggcaaacaccgttgtgagacacactttggtctatttttaattcactgacgaatgaacacttgaaagtaaaatgtacattctcctggtctttgaccatcgccaccaatgtggcacattcttctactattccggaaaacatggttctatatacttttaggttatacacgatttattattaatatgcgcaaagatacaaaaagcccttcgtataggtacaaaaaaaggaagcttttcacaaagcctcctttttcagttttcaataggtattagtttttttttaaggtaaaaagattgttttcaggataacgatgcaaatataggcgcttttcgtgatactaaccaaattaaaaaacatgttttataacatctttttgaaaaaaacatttaagtttattatcatttcaaagcacttttctacacctgcaatcgttttcaatggacaaatataaggctattttccatgaaacactgaaattatcctaaaattttgtttatttcttatcatttaagtagtgttcatctgtccgcccgctatgttttaacacttttgcgtcgataaagaacactatttcttcggcaatattcgtgatatggtcaccggaacgctccaacttgcggaacacgctcaccaggttcagacaagagagtgcactctccggatgccggctgatgtagtcggcaagaatggcagtagcctcagcattgatttcgtccagcatattgtccttggcaaacacagcggtagccaattcctggctctcctcctgaagtgcctgcttggcaagctcgagcatggagagcacctgggctatcatctcttcaagacggagttgcttgaccaactcagtatccaatgccggttcatggcagttgagggcaaagcgggcaatgccctctgcaaagtcgcccagacgctccaggttcgtattgattttgagcatggcaagcacaaagcgcaggtcgatggcaacggggttgtaaagggcaatgatgtcctccacgtcgctgtctattttcagttcgaaagcattgacgcgacgttcgcgcaccaatacctgctgggccagttcccggtccagcgtaagcacggcatcacctgcacggtcgagctgattatataccagggtccacatttcgtctatttcctttttcagcaagacgagttcagattcgataaacttcaccataatgtttctattttaagattacttttgtacaacttattttgacctgcatggaacaatccgctacccgaaacgtcccgtgatgtagttctgcgtctccaccttgtcgggattcgtaaatatcttccgggtatctccaaactccaccatctcacccatatagaagaaagccgtattatcactgacacgcgcagcctgctgcatgttgtgggtgacgatgacgatggtgtactgcttcttcaactcgtggataagctcttccactttggcggtggagatggggtcgagggcggatgccggctcgtccatcagcaggaccgaaggagacaccgccatggcacgggctatgcagagacgttgctgctgaccgccggagagggcgtaggcagagactttcagcttgtccttcacctcatcccaaagggcggcgcctttcagggtttcttccacccgttgacggatgaaggcgttatcggtgatgccattcacgcggagtccgtaggcaacgttctcgaagatgcttttggggaaaggattgggacgctggaacaccatgcccacgttcttgcggagttcgtccacttgcactcctcttccatagatattttgtccgtcaatgcgtatctcgccggtcagacgggtgtcgggaatcaaatcgttcatgcggttcagcaggcgcaggaaggtagactttccacagcccgagggaccgatgaaggctatcacagacttctcctcaatgtccatgctgatgcctttcagggcatggaaatcgccataccagaagttcacgtcacgggtttctatcttgttcttcatacctattgtatatgttttcaattcgtcttaatcttcttctcaaagtatttccgtagggcgtttgccaacagattcaccaggaggataatcagtatcagcaccaatgctgtgccataagcgatgggaagctgcgcttccatatccgtaccgctggtagagatgacatagaggtgataaggaagcgccatgcactggtcgaagatacttgtaggcagctgtggcaggaagtaggcggcacaggtgaaaaggatgggtgccgtctcgcccgaaacacgccccagcgccagaatcagtccagtaatgatattgggcatccccatcggcaggatgacatgccagatggtctgaagcttggtagctcccaacgcgcggcttccctcacgcatgctgtcggggatggctttcagcgcttcttccgtggtgcggataaccaaaggcagacttagcagacccagcgtcaacgaacctgccaggatgctgtctccaaaatccatatagttgacaaacagcgccatgccaaacagaccgaacacgatagaagggatgccgctcagattattcgtcatcatccgtatgaagcgtaccacccagcctttcggcacatactcattcatataaataccgctcatcactcccaccggaaaggcaaataaagcactgcccaccatcaagcagaacgtacctacaatggcaggaaggattccaccggcagtcataccgttggtaggagccgtagtgaggaactcccaattgataactcctatacctttatatataatgaaaccgaggatagcaaaaagaatccccaccatactcaggctcaacagacggaacaagccgaatgccatgttttgcgaaagatgctttctattgaccatatctaccttcttttattttcgtcttggcgaaactgcttccaccgtgaaatttatcaataaactgatgaagaacagcacgacacccagtaggaacaatgcttcgtagtgaggtccgccggcaggtgcctcgcccagctccgcggcaatcgttgccggaatggtgcgcagcggttccaggatggtatggggaatgacggcggcgttgcccgtcaccatcagcacagccatcgtctcgcccaccgcacggccgatgcccaacaccactccggaggtgatgcccgaaatggagtaaggaatcaccaccttatatatagtctgccattgcgacgctcccagcgccagactggcttcgcgcatggcacgagggcaatttctcatcgcatcttccgtcaccgtaatgatggtgggcaacgccataatggcaagcacaatgctgcccgccagcccgctctcgcctaccggcaagttgaacacctgctgcaaaaacggcacaatgacaatcaagccgaaaaagccgtagaccaccgacggtatgccactcagcaactcaatgatgggcttcagcagattccttacccgggaattggctacctccgacatatagattgccaccgacagaccaaacggcaatgcaaagaggatggcaaacagactgacccacagcgtccccgtaatgagcggcaaaaagccgaactgtgcagcaggtgttgccgtgggaaaccattcggcaccggcaaagacgtccttcaccgaaatggtgttgtctttcagcaaatgcactgagtctggacgaacgatgaactgctgcggtacaaaggctataatagcgggcgtacgctccaccagctccgtaatgcaagcacctgcattttcataggaagcgcccaactgctcttccgtataatactgtgtgatgtcctccaaacggaaaaggcggataggaaggtcctcccctcccacttcgttccagtttgtcagctcttcatcaaagacatcctttatctgtgccggagtcagttcgcccacccgattctccttattcaaagccaatacatacccttcttctatcaccttgctgctgaacaagcctagcgcttcggaaaagaggaacacgacgataagtacgatggtaaggctcgtcacaaagccgctacaagccagtataccttctacaatcttctcaaaaatctttttcatgttgcctattgatttctgtatgcaaaggaacgggccggatgttaaggcagtgtgactaacgtttgaaagaaatatttcaaaggtgttacaaaactgttacaacggcccaaagcacattccatgtaacacatttgtaatatccattaccttaatttgcatcatgtgtttacccaatttgcaccatgtgttttatgaagacaagaaaattactcctactcctcgccctggcagctgccaccaccggcatgcaggcgcaacgcatcaaaggcagcgacaccgtgctccccatagcgcagcagaccgccgaacgctttatgaccctaaacccgtctgcccgcgtcaccgtgaccggtggtggaacaggtgtcggtatttcagccctgctggaccaaaccacggacatcgccatggcttcacgcgccatcaagttcagcgaaaagatgaaagtcaaagctgccggagaagacttggcagaagttcccatcgcctacgacgcccttgccgtagtggttcacccctccaacccggtgaaacaactgacccggcagcaactggaagacatcttccggggcaaaatcaccaactggcaacaagtgggtggagacgaccgcaaaattgtagtctactcccgcgaaacttcctccggtacctacgagtttttcaaggaaagcgtactgaaaaacaagaactacatgagcagcagtctctccatgcctgccactggagccattatccaatccgtcagccagacacgcggtgccatcggatatgtgggcctagcctatgtatcgccgcgtatcaagacactcgccgtttcatacgacgggcagcattatgccgctcccacactggagaatgccaccaataagacttatccgatagtgcgcccgctatactattattataaccggaaaaacgcctcggtcgtagcccctctgctcgatttcatcttgtctgccgcaggacagaaaatcatcaaagagagcggatatatcccggtacataaagaataaatcttcattcttcattcttcattcttcatttttttaccctatctttgtccccacgatacgaaaatagtaacattatggcagaaataaagagcgaagaaacaagcgaaaaaaagagcttgaacttcattgagcaaatagtagaaaacgatttgaaagagggtaaaaacgggggaaaagtacagacacgcttcccgcccgaaccgaacggttacctccacatcggacacgccaaggccatctgccttgatttcggtattgccgccgcacacggcggtgtctgcaacctgcgtttcgatgacaccaatcccaccaaagaagatgtggaatacgtagaggccattaaggaagacatccaatggctgggctacaaatggggtaacgaatattacgcttccgactatttccagcaattgtgggacttcgctatccgcctcatcaaagaaggcaaggcatacatcgacgaacagacttccgagcagattgccgcccagaaaggaactcccacccagcccggtgtggaaagtccctaccgcaaccgccctatcgaagaaacactggatttgttccagaagatgaacagcggtgagattgaggaaggcgccatggtgctccgtgccaagatagacatggcaagccccaacatgcacttccgcgaccccatcatctaccgtgtagtgaagcatccgcaccatcgcacgggtactacttggaaagcttatccgatgtacgacttcgcccacggacaaagcgacttcttcgaaggcgtgacgcactctctctgcacattggagtttgtgccccaccgtccgctctacgatctcttcgtggattgggtgaaggaaggcaaagaccttcacgataaccgccctcatcagtatgagttcaacaaactgaacctcagctatacgctgatgagcaagcgcaacctgctgacactggtcaaagaaggtctggtaaacggttgggacgacccccgtatgccgaccatctgcggtttccgccgtcgtggttactctccggagtccattcataagttcatcgacaaaataggatatacaacctacgatgcgcttaatgaattcgccctgctggaaagcgccgtgcgcgaggacctgaacgaccgcgccacccgcgtatccgccgtactgaaccccgtgaagctcatcatcaccaactatcccgaaggacaagtggaagagatggaagccgtcaacaaccccgaacatcccgaagaaggcaaccacgtcatcgaattcagccgcgaactttggatggagcgcgacgacttcatggaagatgctccgaagaaatatttccgcatgacaccgggacaagaggtacgtctgaagaacgcgtacatcgtgaagtgcaccggctgcaagaagaacgacgccggtgaaatcaccgaagtatattgcgaatacgaccccgataccaagagcggtctgcccggagccaaccgtaaggtgaaaggcaccatccattgggtaagttgtgcccactgcctcgaagcagaagtacgtctctacgaccgtctgtggaaagtggagaacccgcgcgatgagcttgccgccatccgcgaagcgaagaactgcgacgcactgacagccatgaaagaaatgatcaaccccaactccctgaatgtgctgccctgctgctacatcgagaagtacgctgccggcatgcagcccctctcctacctgcagttccaacgtatcggttattttaatgttgacaaagattctacgccagaaaaaatggtattcaaccgtactgtaggtctgaaagacgtttggggtaaaatcaataaataagaatatgagtaaaaaaaacctgctgtccggaagagacaaagaactgcaagaaatggcagaacaatatgaagctgccaaagcagagaacagaaccatctatctggacgcagacgacttagccgacctcgcagactggtatgccgtgcatcataaatatgccatggctaccgaggtcgtagagtatggcttgggaatacatccgaataatacagccctgctggtggaacaggcatacttgttcctcgacacccagcataaagagcaagccaaggatatattggaacggattgccgaagaatcttccgaagtgaaagtgctgaaagccaacctactgttgggcgaaggcaaagaagaagaagcggaagcgatactcgatagtatagacgataaggacgacctagccaacatcgtcgatgtatcctatatgtacatagacatgggattcccggaaaaagcattgacatggctgacgcgcggactcgaaaaatatgccgaagaagaagcctaccttgccgtcactggcgattgttactacgcccagggactgtttgaaaaagccaccttcttcttcaataagctgattgacaagaatccgtattcagctccttactggtttggactggcccgttgctactttgaccagcagatgttcgacaaagcaatcgaagcatgcgactatgccacggtggccgatgacgagtttgccgatgcctacctgatgaaaggacattccttcttccaattgggaaatgaggaaagtgccatggagaactacctgcaggccgaaaaattccatcttgtctcccacggtttcatcaacaccttcatcggcctgaacaaagcctccaaaggagagtggaaagaaggatacgactatctggaaaaagccataacagccgaagacagccatgacttcgccttgccctccctttatgccaatgcggccctatgcctgcacaagatgggaaagaagcgcaaagcccaccaatattgtaaaaaagcatacgacctgtcacccgaagagatagacccgtacctgattgagggacgcatctacatggaagaaggtgagtatgagaaaggtgtgaaaaaatgggccaaagccttagagtatgccccctatgcggatacctggcacgaaataggcatgtgtagcatggagataggacaactaagctatgccaagctggcctttgaacatgtcaaagagatggaaccggactttgaaggtatcaacgaaaggctgacctctctgtatatgctgctcaaagacaaagagaacttcatgaagtacaaccagctgtgcgaacatccgttcaggctggaagagctggacaaattgcaacagatactacaagaagataatcaggaagagctggccctagtaatgaagaatattttcaatgcattacaataacagtaattatataccactaatctagcaaatggaatcagtagcctttatccaatggtgtctcgaccacctcaattactggaccatcactttattgatggccattgaaagttcgtttattcccttcccttcggaagttgtagtccctcctgccgcttggaaagccgccaacaatgacaacatgaatatatatctggtggtattgtttgcaaccataggggcaaatatcggagccttgataaactactatctggcaaaatggctgggacgccccatcatttacaagtttgccaacagccgtttcgggcacatgtgcctcatcgacgaagccaaagtgcagcatgcggaagaatattttgacaagcatggagccgtatcaacctttgtcggccgcctgatacctgctgttcgccagttgatatccatccctgccggtctggcacgcatgaaactgggaactttcttgctgtacactaccttgggtgcgggcctttggaattccatcttggctttcatcggatattacttgtccacagtacccggcatcgagaacgaggaacagctgcttgccaaagtaacggaatacagccatgagataggttatgtatttatcggcatcggtgtactcatcgtggcattcttcatctataaaggaatgaagaagaaataaaaaagaaaacggcatgataataaaaaagcggtggacagcatgataaattctgtccaccgctttttattgcttagcccaaacccaaactttctactttacggctgcaatagctttatcatagtctggttcttgcgtaatttcaggtaccaattccgtataggcaatctttccatccttaccgataaccactaccgaacgtgccagcaaaccggcaagcggtccgtctgccatgcgtaccccgtagttttcatcaaaatcggagaaacggaaatcagacaaaggaatcacattctcaataccctccgttgtacagaaacgtgcatgtgcaaaaggcaagtccttggagattgccaacaccacggtatcgggcaggccggcagccagtttgttgaacttacgtacagaagtagcgcacacaccagtgtcaaggctggggaaaatattcaaaataacattcttcccgttcagttccttcaaagagaatgaagacaaatctgtttttaccaattcgaaatcgggggcaacagagcccacctttataaattcaccgataacctttaccggttgtcctttaaattttgttgtagccatagttttatcaaattatatgtatacataacaaattacatacagaaaaagttcacccgaaacttttttccggataaactgttattctacagacgaattaatgataatcacttaaaaaattaaattcacatgaaaactatttttgacgaacttcagcaggaagtaaagaattggtggatttcactcattcttggtattctttatgtaatagtggctataagcctgatgttctcccctctcagcgggtatgcggtattgagcattctgttcagcgtctccatgttgttcagcggtctgctggaaatatcctttgcagtaagtaaccgtagaagggtatccagttggggatagtatctggctggaggcatcatcgacatgattctgggattctacctgatagcctacccgatgctcagcatggaagtcattccattcatcattgccttctggctgatgttccgcggcttctcatccgtaggctatgccatggacctcaaaagatacgggacaagagactggggatggtatgttgctttcggtattcttgccgtcatctgctcgctcatcatcttgtggcaaccggcagtaggcgccctttacgccgtgtacatgatttcgtttgcattcctgattataggtttcttccgtatcatgctgtcattcgagctaaaaaacctgcacaagcgcgggaaagagtggaaggaaaagaaagagaaagaagtatcggccgaataagtagcccacacgaagcgtgtcaaaaggaatcccacctttgacaccttcgtttagccgaattgctcaataacgtctcagaaaacggaacatcgtagtccgtgacactcccatctgccgggcaagttcggcacacgactctcctctttggtgctcccttacaagtttcctcttgttcgcatagagtatcttcatcttgggtgtgtcccctttcttcctgcccagatgttttccttctttcctccgtcgttccaaggcttctttggtgcgcatggaaatcagattacgctctatctcggccatcagtccaaaagcaaaacccagcactttgctgttgatgtcattctgaaacacatacccctctttggtactgtacagcaccactccccttttgatacaggagttaagaatggtcattatctccagcagtgtccggctaagccgtgaaatctccgttataatcaaggagtctcccggtttcatccggtccaacaagcccgccagtttacgctctttgctactcacttttccgctgaccgtctccatgtaccatctgtcgatactcaacccattcttctccgcgaagcgtataatttcctcgcgctgattctctaaaaactgtttttctgtacttactcttaaataagctactactgccataattgataaacgtttattggttattattcaccaccaaagaacggttattcaagtaagagtggcaacacacaactatgactctctatcacagaggatcacattatggacatcccccgaagtcagggaagacttctcggtaaccatctcaaatatgcctataaacaaagaaaacagccccactgaagctgttttctgaaattagttcataaaaaattgatactatgtagtttcatagtatactcttcttcatttcattcactatgtatctcacatcctcatccgtcacataaggaccactcggcaagcaaagaccacgcttgaacaagtcctcactgacaccattcacataggcaggattagccgcataaaccggctggagatgcatgggcttccataagggacggctctcgataccggctttatccaagcaaacacgcatggcctctacattacggttaggctcacaagaagtatgggcactcactgactcatgcgtaacaccggcggcaccacctacggcgccttttactgtctcacggtaggcatcctcctcacctctcacatgcagattcccgtcaagtagtaccgtgttcagccaataattgctgtcgtagcgtccggaaggattctcatgaagcgtgattccctccacatcagccaacagctcacgatacagaccgcacagatacttatggtgcgctatgtgctcatccaccaccgtcatctggccgcgaccgatacctgcacaaatgttactcatcctataattatagcctatacgctcatgctggtagtagggataggactcacgggcctgggtagcatagaacattatctcacgcttggactcttcatccgggcaaattagggcaccgccaccgctggtggttatcatcttgttaccattgaatgaaagcacaccgtatctgccaaaagttccgaggacttgcccgtcaaacttgcttccaaagccttcggcagcatcctctatgaccggaatatcatatctatctgccaccgacatgatttggtctgtcttgtagggcattccatacaaagccaccggaacaatcgctttgggcttccggccggtcttgtcgatacgctccctgatagcctgctccagaagaaccgggtccatgttccaggtatcagcctcagaatccacgaataccggagtagcaccgaggtaggtcaccggatgggaagaggcacaaaaagtgaagctctgtactatcacttcatcaccttgagcaactccgcaagcaagcagggccagatgcacagcagcagtaccggcacttaaagccaccacctttttattccgcccaatgaagcgttccaaatcctgctcgaaggcattcacgttcggtccgagaggaacaacccagttggtatcaaaggcttcttgtatgaagcccatctccttgccgctcatgtgggcgaggcaaagatatattctcttatccatttctttgtaaaataaatcaggttcattcgacagaagaagaactcttccgcctcacataataggggataaatagccaataaaacagcctataaatatacttccggctgaaagttctcataattctcaccatgaccgggatataaacgacaccccttcgataaagaaagaatacgttgtcgggatagttctgcggatactttattgctgttaggaaatgaagcgggcacctttagccctggtataaacgcatcacctgtaaacaaacaattgccaaacttgtaagtcaggcaacttctatcatgaccgggagtctcataaacttccactccagcacttccatataaatatacagtatccccttctttcagttctttcatgacactataatgttgaaatacataagggcacaaactatagcgcgataaattcaatttatctgagtacaagccttcctttcccaaagcagagatatagatgggagtttccggatattcatcaatgatggaatccaagccatatatatgatcaaaatgggaatgggtaatgaaaatacctttcaaatgtaatccccgattgtttatgttctcaattataggggcaggatctccacaatcaatcaaaaaacacaggtcacaattcctgcttattgccaaataggtatttgattcaaatacagaattgacaatccgaacaatctcaatcatttccactttgcccgtcaacaaagagggccgcccaaggtattccatctgaccaatctgtcaatcaggaacagtccatcccacggcatttcaaagttcaacatcctgcctatcaaagggcatcgggcaacacctgccattgtagccttatttgcaaaatcaatggccttatcttcaggagcggcaatgccaatcgtctggatataatcttgaacatgtaccaatgcatcatttatgtgatccaccggatgtaccataagcacacgtgaatacactggcttacaaagttcattgtcctctgaatagagtactgtccatgacatcgtatcacttccccaaactctacctttaaaatcatacactcccctggacgagtgaacagcagatatctgttccggagatatgaatggtttaggaatttgggcttccgttttgggaaatgcctccgctaaaatttcacagaaacgttcaggagtaactattcctcctttctcaatataaagattatgaggtgatgcacaaccggactggtcaaaaacagatacatctaccgacacccgtcttgccaatttcttcgcagcatgctccgatgacagttcctccctagcaattaccgcataagacaatttggggccgaaaacaactgtctcacagtcaatcatcgaaggatactttgccaccgtctcaaccgcctctttccctccccatgcaattctgacctgggcagacccagacatcaactctcccaattttttggcatctctcgagaaatatacaacagccacagtatccatcagagccgaaccttcaagtgtatagccatcctcagttgtataagtaactccttcaaacgcattcaaaagcgcacggaacacaccgtcatccttggcagagacctttaataagttcacatttttagttatgatacattggaccaaggcaaacacacctaatatttgtacattgcctgccatccaatgacaagccagtcctcgcgaatttgccttcaagaaatgttttgaagaatttggaaaatgcaagaaggtatcgcaataccttatattccccctcagaccctcttcggctatctgccttaaatgagacgcttcacaccaattcgacaagaacagcaagcctttgtccttcaaaaaggaaaaacgttcatcggacagccatttctttgcgacttcaccaatgatgccaatcagtgcctcgaccggttgctgccgaagccagtccagtttatcattcagacaagaaataataccctgcagctgctcctctcccgtatttcctttcaaagttcccctaaaatattgaatgtccagatgagagtccgactttatttccgtcccttctttctgttgaaacaccaacttggaggaaagaatatccccacatcctctgacctccgctttcttcaaccgtccgacaatacggaacctctgtcccggacgtccataaggacaaggcgaatcttccagaatgccgatatcatctgtcaatactacattgcccggataagaatgaggaataggagttataaattcaagcatcccttcctttcccgccggaaggacacttcttgtaacggtatcgcgggccaggactttcacataagaagaggcatgcttacagccacaggcacaatccggataattcaaccccatctgctctgtaaatccataaatgtcgatgacatcttccggacaaatgccaaagcaccgcgctaattgctcattaaaaagttctttgcttattttctcactttccaattttttccaaccgccaatatggattatcttggaacctttaggcaaatgcagtctcacatctgattccagtattgacttcaatacatgttgatacaatatataagtgaatccaaaaaccacaacaggctgtccggatggcaattcttttataaatgcctgaatgccttccacatcaaaatatgagagaccattctcatccgctttcagaaaataaccgactttactcgcaaacttaagatacccggtcaccgcggcaaatcttgctccaagcaattttctggaggcagaacggggatcaatatccataatcaggaaaggtttcctctctttgccaatgaattcactgaccacctttaccattgctttaccttgtctttttgctgttatcttatcaatgactacggtactcggtattccagaagtggcagaggactgtaatgccaaagtcagttcttcccggggaactgaattcaggttgaatcccaattccttgaacacactgacggccactggcggaagttcatccaccgaatgaatcggctcatgaggattaaagttcttcctctcacaaaaatgccgatacatctcattgtgctcatagtggaaaacaagctcatcacgcagagcttccataaacaaattatcacattcttcactcccatcataaggaggtctgttcaacagttcttcaaccatgcttcgttcattcataatcatttcaataataaccgttgtatcttgcccgatgttgttcggggaatactatcaatatgttccagatagaccggtatcttataattctccaccagagccgccatctctttccggaccctttcatcatcctcttccgtcaggcagccaacgatgaaagccttcacgacttctcccatcacatcatcatgcacaccgatgcatgcagactcctcaatacccggaatggagttcaaggcctcttcgacctcaatcggactgacttttttcccgccgacattgataatctcctttttacggcttttcaggtatatatagccggagtgatcaatgtagccccaatctccggttttgaaatagccgttataaaaatcattcctgaagatatcttctgatactccccaatagccagcacacacatgtccgccctttacgcacaactcgccctcctgccctgccgcaagtaaatttccttgttcatcacaaacgacaatttccgtaccgggagaagacttgcccactgaatccaaatgttccatatcggtatggaaatcgataaaagcgcttctcgaagcttcggtcaacccatagtgcatacatatcttggtatcaggcaacagacgcatcaatctctctttctcagttttcggcataaatgcactgcctatctctatatacctcaattgggaggcatatcgggcaatcctatccgcactcatcttggcaatataggcccagctggcaggcaccataccaaaaccagtgaccctgcatctttctatctcaccgaagaatctcttcatgctggcaaagctgcccaagaggattagagtggcgcctttagccagtacacatctcagccggcccaagccgaaagaatgactgataggcaaagccagcaattcaatatcctcggaagtattccctatgaaagtatttatattatttgcagcggacaattggttggagtaggacaaaaccacccctttgggcataccggtggtaccggtagtaaacagaaggtcggcaatatccctctcttgaggaaaaaccacatcaaaatccttatcgaatcctatctctgtgaacggaagcacctcatgtccccctttattgcgtagctcgccgataatcatggaaggtgctgcacaatcaatgatcctttccagacgggttacattggtctccggatcaatcgggacacaaatacaccctgccagatgcgctccaaaataggcataaatgaaatctatatttttacttgcagagacaatgatccggtcgccctttcccactcccttagaaatgaaataggcagccgtatgcttgatattgttccacaagacacgataagagacagtcacttcccccgaaatgacggccgtcttttcgggagaagtaattgaatgccgatatatgatttcctctatcaccataattattacaacttttcctccacagctgctatgatatcatggacatcttccagatccatcatctcttccggctcaaaattgatatcaaaggcctcttctacattagaaaggattgtcaaatgtcccatagaatcccattggggaaaatcaccgattgtactattctcattaacattggatacttccgtttcacagacagaagctacaatctcaaatactttttcttttacgttcataatctatctatttataaatgacataatccgttctacgactttatcagttgataatccgttctgttccatcatataaggatagtcacccactatggaaaaactatccgaagctcctattttcagcaatttaggatgtgagttatattgtgataagtaatctgccaaggagtcgcccatacctccaaccatacggtgttcttcaagagaaacaatgaaaggcgcattaaaatctataacttcaatatccagaggtttgacagtatgcatatcgacaacagaagcagaaactcctttccctgctaaaatttcagctacctgcatagccatatacaccatacttccggtagctatgatctgcaaatccttcccctttcgcagagtgacagacttgcccactttgaaatcaaaatcctcgtgatagacaataggagttgcagttcccccatacaagcgaatatatacggggctttccaactgtactgcagcttcaagagccttcattgcctccaatgcatcacaaggagctatcaccgtcataccgggaattgttttcatcaatgaaatatcctccaacgcatagtgggtatttcccattagtgtcaacgaaaatccggaaccaatccccacaagaacttgtgccgaatgcatataccccaagaattggcggacttgttcaaagcaacgcattgaaacaaaacaagcctgggctactgatattgttttatatccttcatccgtcaatccagctgccactccaatcatgttttgctcagcaattcctaagttgaaaaacttgtctggatacaaggatttaaatttatcaagtccggcaggtgttgacatatcagccgagagaacaatcacattatcctttttccgagccacatcgggcaatgtaataccaaacatacttccaccttgtcctaaagctgaataaatcttaggattaatcttactatttcccatcatacattgcttttatatcttctacagctttttcatatttcttcaatgacaacacgcaatgatgcgccatcttattattcatcagaaatgaaatgccattcgcttttactgtatctgcgataatcacccttgatacatcagatggcttattcaaaacgcatagcaactcctctatagaatgcccatttacgacctccacttccaaaccaaacgacttgaacttttcttccaaagagtattggttcatgatttctttggtaggaccatctagttgatagccatttctatctacaatgattataagattattcagtttgaaatttgcaatagacatcaatgactcccatacgattccctcgtcacactctccatcacccaatagcacatagactttattactctggtactttttctgcatagccaaagctactcctacagcataagatagccccaagccaagactacctcccgaaaattctattccataagttaaattccgatgtgggtgtccatgaaaagaggtaccattcttatcaaatgtggataaatctttctcacacagcaggcctttcttccacaaggccgtatagtaggccaaaacgcaatgtgccttactaatgattatccggtcccttttctcgtcaaatgtatcatccacataagctaccgaatagagcgctgcaaatatttccatggcagagaaagctccacctatatgagaaccgttactgcccgtacttaaagccatttcaagagccttaagtttcatatcataacaatctttttccaggctaattattttattttcaatcatattctatacccccccgtaatttttataacttcaccgtcaatatatgacgaatcatcactggcaagaaatgaaacgactttagccacttcctccacagtacccaatcttttcaatgatgtatcattaaccagttgccccatcaccttgctatcaacagaggtgctcatatccgtatcaagataccccggtgctacagcattcactcgaatcttggctgaagcaagttcttttgcccaacaagtagtcatacttataagagctgctttactggctccatatacagtgttacccacagtcggtttcaaggctgcaatagatgccacattgattatagatgccgattttgagcgcaacatcaatttcacaattccttgtgtaatctgcaggggagcaaaataattcacttgcatcaccctatgagcatcttccatcttcaatcggagtaacccatccgtattcaatataccggcattattcacaagtatatctatgacaatttttaaagagtatatttcttttaaagcaatccgtatggcatcctcatcagacaagtcaaaatagataggatatatctgtattccatattctgattggcattgcctatagaaagcatcctgctcagctgtctgtttacgagtgcaagctataatattggctccaccgacaaccagctcttgcattattgccttgcctatacctcgattacaacccgtaatgagggcagtacgtccttcaagtcttttcataattaatccaattcaatcagaggcaggcatataatatggtctagtttaatataagcactcccccaagacaaacctgaaccaaaaccacaaattacaacatcagcatcttctaaagataatttttcacctataccaacaaccattgtaataggtatagaagcactgcttgtattcccatattgcatcaaagagaaaggtattttgtcagctggtactttcaacttcttacctattttatcatccatatatttgttagcttgatgtaaaatcagataatcaatatcatccaatgagaaatcataatgttccgtaagagatttaatactggctggaggttccttgatggaaaatccaaatacattcataccatcaagaacggattgagtacggttacgaataatcccgggttccacttcaatcattctcatagactcttctgttatcggatggcgcataccaccatcaagattaataattgcatcacctcttgagccatctgttgcaaaatggaataacatagggcttgctccttcattaaactctaaagcggtagctgtacctccatcaccatgcaaaggccatatggtcttatctaatggtgattgcaattgagaagttgtttctcctaccaataacaaccccttctttattccgccattctgcataagccctgcaatgacagacaaaccgtaaacatatccggaacatgctaaaggtacatctatcgcgtaacactctttagacaatccaagtttgtcctggaggagtgcagaagtatggggagtaagataatcacgagacaatgacacatatatcaatgccccaatatcctgcttattccattgaagcctttctatcaattgctctgctgcttcataacacaaatccgaacagcacatgccttttgggaccatcctggagcgctcaatatgcgttaatgctatcaccttatctgcctcgccaggagaaaaaaaactcaagtcttttatttctttgactatttttggaacagcagcagcaacccctgcaaactttacattagaaaatgataaaaatgccatatctcaatttataagtaattacaatgaatatccaccatctatttttaaacttgttcccgtaacccatgatgaagcatctgataataaataaataatcccccatgccacatcattgggtaatccataacgtttaagtggataattgctaatatctttttgtttttgttcctctgtaaaactatcaatatcattaataggagtatctaccattcctggatttacactgtttactcttatcccctttacagctaattctatggccgcattcttcatgaaaccatctattgcacttttagtcatggaatacattgcattaccaatatctaccgaataaacaccagaaatagaggaagtaaaaaccatagatgaaccacgtttcatctttttcttttttatgagaaattgtgtcagataaataggtgccaaagcattagtattcaaaatatgctgcaattcttcacgcttaataaaagcaataggttgtttaccaccaatacctgcattattcacacaaccatgtatttcaggcaattctttgacaaacatttctaatgcatcaacatctgtcagatcaagaattctcattatatgcccctctccttccagttgagaaaatgtctcttctaatcgttctttatttcttcccactaaaataagttttgcccccaaacgagagcactctactgcagtggcttttcctatgcccgaagaagctcctgtcaccaaaattgtcttgccagataaagaataaggattgtacatatcaagctctttttaatgctactcgattatataaatcttctatagttcttgaagctaaaatatcgtcccctttcaactgtacatcatattcttcatctgccatcgccattaccgataaagcaatcaatgatgaccactcgtccaactctttaaatacagtctcagcagtaaacacaatcttttcagtttcatcaaactgttctgcaaaatgctctataaaatcatttaagtccatgattaattattttattattaatatttaattaaagcagcaggattacccatatatgttgaattgtctttcgtagaacgaattataacacttccggcacctaccacagtattatttccaaccttctttttctgcaacacaatggaagaaacaccgaaatagttttcattaccaattgtagtctcgccagaaacacgtactcctggcataaaagaattataattacctattacagcatcatgtccaactataacatctccgttgaaagcgttgaaatcaccaattgttacatggcaacttatatggcaatcccaagaaaaaatatttcccttacctatctgcatatttttagaatcagcaaatcttaaattgggagcataaatattgggaaatataatattgtcattgtatatccctgaaacgatggaagctactccatgagggttaccaatggctattatcacattaagttgccgagaataagcatttagataatccattccacctaaaacccgaccatattcgttttcatcgccaacactttttgcatcatctatgaaacctacaaaattccaaacctgtttttttttatttatagcacaaagcaaacaagctatttcacgcccaaaaccgcctgcaccataaattactacatctttcatattcttaatttcaattatttccagtgaaggcttccatcgttactgaagtatttgaactaatatccttacgcaaaagcactttcctcattgttaaaaatattatcttcaaatctagtaaaaatgaacaatggtccacataccaaacatctaattcaaactttttcatccaactgattgcattgcgcccattcacttgtgcccagccagtaatccccggacgtacttcatgccgacgggcctgctcttttgaatagagaggcagatattccggcaataaaggtcttggaccaatcaatgccatatcccctttcaaaacattaatcaattgcggaagctcatcaagactagtggcacgaacaaatttacccacatgagtcaatcgtttagcatccggcaataatttgccttctacatcccgttcatccgtcatacttttaaactttatcacacggaatattcttccatcctttccaggacgctcctgagtaaagaatgctcctgcacctttattggcaaaatgcaaccaaatagtaataagtaataaaatgggccagataacaaccaatacaataaagaccagaatgaaatcaatcactcttttcaaaccatatttatacatactctcaaaaatgcttcattatagccttatagctcttatctacagtataattctcacacaaaaatctataccccctttctcccatctctttcattcgtttatcatcctctaccataaactcaatcatctccataaaggtatctatattcccattctctgtccacagaccaaaaccaccttcttcagctatccgtccgatgtccgtattcacatctgtagccattagcaccggcatactacattccaaatacgaaagtaggcgcgatgggaaattgggtatcgtaaaccgcttgtccaggaatatcaagcctacatcacacaagctcaccaattcatcatattttgctttcggcaatgcagcaagaagacaagcgttttggggcaagtgcgtatcaaaccataatttaaccctcatatactctgtaccactacctacaattacaaaatacgagtcatcccgctttttattctcctcaatcactttcaataaaaaatctatcccctggggctttcccaaattacccccatagatgaaaatcctttttgatgcaggaatattcaattctttcagcagttcactctctttcctatctcctttcaacctttcctgcaacttcacactgttcggacagatttccacctttgccgcatcaatggcaggattatgcttcaacacatactcacagttggcaggtgacatacaaccgataaagtctgacaattcataaagtttttcttccttactcttgaacatcctataaagaaagcttttcttggagaacatacccaaatccaccgcattctgcggaaaaatatccttcagcatcagataggttttagcattccagcgttttttcaaggtctggattaccttattgaaggtgatgggaggagtggaataaagaataaggtcgaacttcacatcccaccagtatttattaatagcatgtagatactggctttccaacaacaaagtagcaatccctttctccacaatattcgttttctggatattaagtgtctttaccttcaatattcttgcacagccgttctccatgactccggtaggctgatggaatctccgctcataaggggatactatatacatggcatgcccgttccttataaattcacgcatcaggtccgtataaatgccacgctcttccaaaccattgatacgggatattgtcaaaaaaagaatgttcatcccagcagtcagaattttctccagaccatcttgttcaccactcccgtatagctctggattatcttcacaaccttggccgatacattctcatccgtataattgggcaccggcaggccatcgtcaccattcctattcatctccacagcagtatctacagcctggagcaaggatgtcccatcaatgccggcaaggacaaagatacccttgtcaagagcctcgggacgctccgtactcgtacggatgcatacagccgggaaaggatgccccaccgaagtgaagaaactgctctcctcaggcaaggtgccgctgtcactcacaacggcataggcgttcatctgcaggcagttgtagtcgtggaaaccgagaggttcatgctgaatcacacgtctgtcaagtgcaaagccacttgattccagacgtttcctgctacgaggatgacaactgtaaagtatgggcatgtcatatttctcggccatagcgttaaccgcgctgaaaagggacaggaagttcttctccgtgtcaatgttctcttcccggtgcgcggaaagcaggatgtatttacctttctggagatgcaacctctggtgaatatcgctggactctatttcggacaaattctcatgcaggacttccgccatgggcgaaccggttacgtatgtacgttctttcgccacgcccgaagcgttcaggtatctgcgggcatgctccgaatagcagaggttcacatcggaaatgacgtccacaatacggcggttggtctcctcaggcaggcactcgtcaaagcagcggttgcctgcctccatatggaagatggggatatgcagacgtttcgcgcctatcacgctcaggcaggagttcgtgtctcccaacaccagcacggcatcaggtttcacctgcaccatcagcttgtagccggcgttgataatattccccatcgtggcaccgaggtcatcgccgacggcatccatatacacatcggggtctttcagcttcaggtcacggaagaagacaccgttcaggttatagtcgtaattctggcccgtatgtgccagcagacagtcaaaataactgcggcatttgttgatgacagccgccaggcggatgatttccggacgggtgcccactataatcagaagtttcagtctgccgttctcctgaaacctgacttgcgaataatccaattttagttccatctgttcctatattctttaactcgtttcagactttttcaaaataagtgtccggacgtgccgggtcgaaacactcgttgcaccacatgaaggtcaccaggtcttccgtttccgaaaggttgacaatgttgtgcgtatagccgggaatcatctccacgacctccatcctcccgccgcttacctcgaagctgacaacctcctccgtacctatcttgcggagctgtatcagaccgtggccgctcaccaccacaaacttttcgttcttggtatggtgccagtgctggcctttcgtaacgcccggcttggagatgttcaccgagaactgcccgcggtcggaagtacggataatctctgtaaaactgccgcggtcgtccacattcatcttcaggggatagctgaaccgttcttcaggcaggtatgagaggtatgtggaatagagtttctttgtaaaggcatcgctcaaatccgggacggacaaggtaccgggcatttgcctgaaagaccttatcagttccacaatgccgcccaaggtaatggtatgtaccacgggcacttcgcaataatccccgttgcggtgttccatgccgctcagggcagagataagctcgtccaccacatcgtctatgtaaaccagatgcatcaccaccgaagggtcgttcacccggatgggcaagtcatgggcgatgttgttgcagaaagtggccaccgcgctgttatagttggggcggcaccatttgccgaaaacattcgggaagcggtataccagtacctttgcacccgtttccctggagtactcgaacaacagttgctcccctgcccgcttcgattcaccgtaagggttgtcgagtgcggcctgcgtggaagaggaaatcattaccggacaggtattgccgtgcttcttcaatgtatcaagcagcgtggaggcgaagccgaagttccctttcataaactcagacgcatccttgggacggttcacgcctgccagattgaagacaaagtcagcctgtttgcaatagacatccagttcggcagggtcactgtccatgtcatattcgtagatggtaagttcctcacctgcaatgccgtaattacgggctttcccgtcacggatgttgtgcagctgggatacaaggttccggccgacaaaccctcgggcgccggttactaagattttcataaactaatgggattggataggatggaaaagttaacaatggctatactattcactcttgatttccgcgctcttcgccttttcctccattccgaggtcttcgcggatgaagcggagtttcaaaagaagctttttcatgccctccacatccaggcgggcggtgttatggctgtgatagtcctctatacgggcaatatcctcattgccttccgtgaagaacttgtcatagttcaggtcacgggtgtcgcaggggatgcggtagtagtcgcccatgtcgacagcctttgccatctcctcgcgggttaccagtgtctcatacagtttctcgccgtggcgcgtgccgatggtcttcacctccgtctcagcgtatttcggatcaacctgcgcgtatgtttccttcaaggcctgcgccagtacatccaaggtggcggcaggagccttctgcacgaacaggtcaccgttatgcccgtgctcaaacgcatagattaccagatccacggcatcgtccagcgtcatcatgaagcgggtcatgttggggtccgttaccgtaatgggcctgccgttctttatctgctccacccacaagggaattacagaaccgcggcttgccatcacattgccgtaacgggtacagcagatggtcgtaccggcttcctcacccaacgcacggcccttggctatggcaaccttctccatcatggccttgctgatacccatggcattgatgggataggcggccttgtcggtagaaagcaccaccacattcttcacaccatgcgctatggcggattccagcacattgtccgtaccgatcacattggtctgcacagcctgcaacgggaagaactcgcagctgggaacctgcttcaaggcggcggcagaaaacacataatccactcccatcatggcaccgtccacagactggcggtcacgcacattaccaatgtagaattttactttgggattttgcaggtgatgacgcatgtcatcctgctttttctcgtcacggctgaaaatacggatctctttaatgtcactatcaagaaagcgacgaagaacagcattgccaaaagagcctgttccaccggtaatcaacaaaattttatctttaaatccagacataatatcttatattaattcaatcttataattacttttattatcagttataatagctttaaaatcttcttttcttctttgaatattataatagtctagtagctcatcatttgaagttattggaacaaaagaggttagcttactaattaattgcgagaactcactatcgaaatcattgtctatgttaaatacaagttgctctttataaataggattagccaaaccaccctttcctgaatgaattaaaatattactggcacataaagcctctaatgcagccaatccaaaaccttcatataatgaaagttgaaaataatatttggaacgttttaaaaaggctatcttttcttcttcagatacttcccctatcaattctatagaatcattcaaaccatatttattgattatagattggataaaagccactccttcccctttccttcctataataataaatcgataatcagcaaatgcaggtattttctttaattcagcaaaaacctgcaaagccttatccacccccttccttctcacattaccttcattccccatccatacaatagaagtaaatagattctctttcggaatatcagagataaacagtcttgtatcaatagcatgctcactataacttaacttcttcctcgaggaaaggcatttaacgatattctttaaatcagattgtgatacaactatacaagaattagaaatccaataacagagtttaaaaaacaacacttgaattctataactgcgagtagaaacataatctgcatccaaagaatcaatacctccagtaaaataagtttttttacccaagcatttcgcaaacaatgcagcaaaaaacgagtatcgataaaaataggaaaataaaatatcatatttccaaaataaaaggctatccaatatccgattagacagcgaaacatcatatcctaaatctcctaacaaaacaatatctatctgataaaacttttgagttttaaataattcaagggaacccacacttgagtaaaacaagattctttttttcatattttagtgctgcattatgaaattcattaaccgctttgcttgaatctctgaatttttattctctaatatgaactgtcttgcatgtttgccaaattcatccaattccacttgttctttatttccccattcttttaaaacagcagtaaatgtctctcgtgaattatctggtatcaacaccaaatgctcttcgtaatcagcaggaagtcctggaagcttatacataaccgttggcgtccctgaagccatatattccattgtcttcgacggaaaagagtacttggtaaattctgcatctcctttacgaggattaaccaataatgtggcttgttgttgcatttcgaatacacggttttgctccacaagtccccaatatattatacgagaatcatttttagcagctacttcaacaaaaggttgatctaaaccaaaaccgcatatccataaagaaaattctttatcatcaatttcattaaacgctgctattaaatctcgaataccaaaacgggtatccaacttacctgtataaagaattacttttttcctcttcttttgagaagtaacttctatgggattatatacaccttccaaaagatgccatggacgaaatccaacatttagcttatctttcatgtgctcagtaagaagaacgaaagagtcaatctcaggaactaatgcataaatctgattagtaattttcttgcccaatatcctacagaaccaagatgtattatctccaaaatattcaggcaaatccaaaacaatacaacatacttctacattgggatatttatattttaaatcaatggcagccttcaaatagggataaatcacagaataaaccaatattgtaaccttttccttactatgtaaatccaaccattcagtagactccttaatgatagaacgataaatgctgtatttttttatataagtaaaattaaagaatgcaccattcacacctttcattgaagcaaattcaaattttgaacgaggaaaaaaaggactactgcatcgcattggaaaactccctatatcaggaacattaactatataattaggcttatactctaatttatcataaccatgcaaaagtgctctctgaaaggttgttgcactaacagatatacgacctttggttcgtttatttataagtggcattgtagtaggttcacagaaacagcccaaatacaaaactttcataaaataatttataaagaaataattattttcaaatatatgatttaacaaatgtgcctttagaatactcatttaaaatgccgaacaatagacagaaaaatgcaaaaaacattggaataccttcaagaataggttcagacacaaacccgacaagcattataaacgaaagaaaagtaaaagctaaacgtaatatcggattaacagactttagtttataaactctaacaaaagaataaagatattggcatgtcaaataaaacaataacaataatggaatgatgcctgccactctcccacagtcaagccataaattatgtgcatgaccaattttattattcatattcattcctcccaatggataatccaacaattttgagccaactatcattaatctatcaattctacctcctccggtttcaacttcatctgtttcaaaccgatcaaagacaatcaataaatccccatatgtcgtataaatatatgacacaattccaatgagaaaaattagagatattaacaacaacctgattttttttatagacatacctttaaaattaaatatcaatgacatcagcattaatattaatatagccacaatacaagttctactttggacgcgaactgcacaatacaccgagaggaaagaacctattagaaataaaaatttcttttttcccttaattccgcaacactattacaaatataactttttaagtacctgagcaacaaaaagttgctcaggaatttgccatgtcagatttttcacctatcttagtgttgcaaatcaaaatatgtatcaaacccgacagacatggcaaaggtagcaattaaatccgagaaactcactccttttggaggaatattttcaataatggagcaatttgactccagactctcatctgtaatcgactcaaccctcggtatgagatgcaggctgtatggttatcaatacagcgaaatcatccgttcgcttatgagcgtttatttttgtggcggctcatgcatcgaggatgtcaccactcatctgatgtaccacctttcgcttcatccgacacttcgcacatgcagtgccgacacgattcttagagccataaaggaactgacccaggataacatttcctacacatccgacactggcaagacctacgacttcaacacggcagacaagctgaatacactgctcctcaattgcctattgtccacagggcagctgaaagagggcgaggggtatgacgttgacttcgaccaccagttcatagaggctgagaagtttgatgcgaagcctacatacaagaagttccttggttatcgccctggcgtggcggttattggcaacttgattgtcggcattgagaacagcgacggcaacacaaatgtccgtttccaccagaaggacacgctgaagaggttctttgaaaggtttgaacaaaacaagcttattatcaaccgtttcagagctgattgcggctcgtgttctgaagagatagtggaagagattgctaaacactgcaagaccttctatatccgtgctaaccgatgcagttcgctctacaatgacatctttgccctcagaggttggaagaaagtggaattgggcggcattgagtttgagctggcctccattctcatcgagaaatggaaagggaaggcataccgtcttgtgattcaaagacagaagcggatagacggcgaactcgacctgtgggaaggagaatacacctaccgctgcatccttacaaatgactacgagtcttccgagaaagagattgtcgaattctataacctccgtggagggaaggaacgcatcttcgatgatatgaataacggattcggctggaacaggcttccaaaatcctttatgggagaaaacacggtgtttcttctgcttatggcactcatacgcaacttctataaattcatcatggcgaggcttgacgtgaagaggttcggactcaaagcaacaagccgcatcaagacgtttgtctttaagttcatctctgtgccagccaaatgggtcaggacatcaaggaagtatgtgctgaatatctattcatgcaacaatgcttatgccaatgtgttccagaatgactttggataacaccgacaacttatagtcgtgattttgcgtattgcctcaagtcgcatggtggggtaaggggcatttatatgtctttatggtgacattcgatgcactgtgccccctttttactaacgatgcagattcttttcgcttctgtatcatattaggcgcgtagttgcggatttgaggttttcttcccaatggaataaaaataaaccctaagaacgacaaaaggaacaataattttgtcgttattagcgttgcagaaataaacccttcttcattatcaatccctattaaaggaatattacgccccattcctatcacaagaaaaccattttccaatacatctttaattaccgagacaatagctacggcagacatagacaatgccataatatacaataaattaattaatgacacatcatcacttctccgtactaaaaacttacctaaaagatatataaaggggaaattaatgaaaaaaataaaagtcgtaacatacccaaatccatctgaaaatataaatacagacaatgcatacagcattccccacataaaaaggacacaaaaggttttatctattaatttatatcctttatgaacaagaagataaataaatggtaaataaaacatgtaatatccatagcctgaataatctaaaaacatcaaagctaatagtatactcaaaaaacaatacttattcttatgcaatatcttcatgtatcattccccaatatctcacctgaattatattttcagagaataaatcaataaataactttacgcggcaaataatacctaaacaacatagaaaaacatgtcaatgatgtatctatcgtccctacagcattcttataatcaattttttgtgtaaaaaagatacttctaagtccaatggtatacaattttccataaggataagcaaaaaaaaggattgcttttcctacttttttctcaagctctttccttgataaaaatatttccttctgcatattattttcatatcgcaattttgaatgtgactgagtatgaaagcctatggttaccaaaggatcctcactatacactttcagttcactattcccaatatatccctcttttccaataaaattagtagtaatatatacggtaaaagggatattatatctcttcaagaaaggataagcattcatatatgcatccatccagccatcatcaaaagtaataacagcttttttcttttccgtcttttcataaatatcatcaatacttacaatttgataatttatccttaattcatctattatttctttaaatctttcgaccttacaaagacacgcaggaatctcatctaactcctcattcgtaacatgatggaacataacaatcacacctttttcgcaaaaaaatgcattaaaccatacaaaaactctttctataattatgtagaagcaagtaagtactttatttacaaacatattttctaaattttcttaatattagatctttgaaatattgaagaatcattgaacgattgaaactccttaaataatactcggataagaactgaattgttcttatcccaaatttattatcgctgaactctgacatatcataaagataaataccatttccctcaatctcttgcaaaacattcaactcaataggtcgcaacctcataccaaatgttctaattatcttatagggcatattacggcaactcaacaaataacgggcctcatctatattttcacgattaccattcaaatcaatgatcacatctttagatggaaactttgatttcaataataaacactgagcataagtatcataatgcactagatctctaaataatggtaaaacatatttttttcgtccgtatataagctcaacctgataactattgcttatttgtccctcattagtatgtacccctacgtcactaaagttagtagaaagtgaagtgtaaggataaataaagaatttattggttaagataagatatgcctcgaagtatttagaccaagccttatcccacccttttattatcgaataggtatctaccttatcaaaattacagtcccatttttccagccatttacgaaacggcttccacatactgtaagtaaacgtttctccccaagtagaagttgattgataagcaaaaacatcatgccctatattcaaaaaataaaggggaagattattaaaaccattgtgctcatttcgatataatgaaataccagcaacatttacatcttctccataagcactcacagtttgttcaatgtaatcataaaaaaaaggagagacatataaatcatcttccaaaatagtaacagatttaaagaacttacttaaatcaccgcatctatatatatgttctttcaatcccctctttttctcctgaataatcacatatttgttcccatgagtccattcgaaattttctacaaaatcataaagttctgtacagtcactcttgtctatacttacaactaagggaacagctatggaagcataataagcctcctgcaaacttttaagtaatcgttttatagatacaatgcggttataacctacaactacaatagcattgtggttaatttcacaatctggaatctgtaacataatttacaaatgtttattcaagaggaatatttaacaaacataagtctattaaagaaaagaagaaatggataatgtggaatcaccttaaaaaggagaagaattatcgcaattttggaaaaaccggcatgaatgatacttttccaaatatacggcaacgaagcaatctcttttattcgcaaaatactctcatttttatctgttcgtacatgcataatctcattaaacaaacagctatacaaatccaatgctaaaactctataatattcgtgatttgggaaattctcaccatacacctcttttaacagattatattgctgcatatgtagatattttttagacataggataattatgcatatatttagtcatcaaagaatttggattcacaaacatgtaacaataaagaggctcattaatataaaataatttgcgtacatatttcagataaatagttgtaaagcctacatcctcacaatacgaaatatcttcgttaaagcgaatatttttatctttcaatatggatgtgcgatacaattttgtaccaatacagttaataatactagttttatgaagtacgctaaatggcattaaccattgttctatagtatatagtccagacttcttgtacaattttgtatcaaaaacaaatagatttggtttacaacacttataagtaaatacaacacagtctatatcattatttgcatgataaatattcaagcatttttgaagtgtacccggctctaaaagatcatcactatctacaaatattagaaattcaccttgtgcaacttctatagcatgatttcgagccgatgaaactccttgattagtctgattaagtacttttatacatgaatacttttgagcataatcattcagaatattcagactattgtcagtagaaccatcatttaccaataataactctttttctacttcttgtgctaaaagattatcaatagtattggagataaaagcagaagcattgtataccggaattatgatactaattaaattacgtttcaacatacagtttattatttccctatgcagtaatattgaattcctaattgctccaactcgtcagaatcataaatattcctgccatctaccactacacaatttttcatacttttgacaataacgccccaacttggtaaacgaaactgcttccattctgtaagtaccaacaatgcatcggcgtcaagtacagcatcatacatatcattagcatatgtaattgcatcaccaatacgacgtttacattcattcatggccacagggtcaaacaccttaataatacagccagcttctaacaacaactttatggtgacaagtgcagtggcctcacgcatatcatcagtttccggcttgaaagcaagcccccacaaagcaatagtctttcctcgcaaattgtctctataatacttcttcagtttattataaagaatagttttttgactctcattcacagctaccacagcttttaacacctgcatctgataccccttcttctcagccgttttaataagtgctttcacatctttaggaaagcaactacctccataaccacaacccggatagagaaatttacttccaatacggctatcactgccaatccctttacgtaccatattcacatcagcacctactaactcacaaagattcgctatatcgttcataaaagagatgcgagtagccagcatagaatttgctgcatatttaatcatctccgcactagatatatcagtaaagataacacgaaagttattaagcaaaaaaggacgatagagtttggtcatcatctcttttgccttctccgattctacccccactactacacgatcaggactcataaaatctttaatagctgcaccttccttcaaaaactccgggttactagccacatcaaacggtatttctacaccacggctatcaagttcttcacaaataacagcctttactttctgagctgtacctacaggaacggtagatttagtaacaagaatagtatatttcttaatattctgaccaaataaacgagctacagataagacatattggagatcagcagagccatcactatcagagggtgtacctacagcactgaatacaatatcaacattatcaagacaagaaatcaaatcagtagtaaaatttaaacgaccttcacgatgattacgaagtaccatttcatccaatccaggctcataaataggtaattggccagactgtaataattttattttctctgcatttacatctacacaagtgacatttacccccatttcggcaaaacaagtccctgataccaaacctacatagccagtaccaacaattgcaatattcataaaagctaaattaatttaaggaatatcttatcattataaatgaatcaaactacccatttcgtctagatatttaggggcaatatagctcatatatccccctaaagaagtaaacgtcatttcaccaaaatacaatttgccatttgtaatataaaaatcaatccggacttgatgatggccttttgacaaaatttcagcagcttgtaacatatcagacaaacatgtaggtttttcaatcgtcacacaatcctgcttatgaccacctgacagcatatctggttttagattccattctaaatcataccatgccaaacaacaacctttatataatactctgtcagcacataccaaaattgaataaggtttcccttctaaacaaaataccttataatcaaccaaagaggtagaattagcattatcattctttaaatactcctcagctataatcttaggttttatactattataatgaggttctgcgtaaattgttccgaatttcaattgaagccaagtattcagttgttttcttacttcatcctcatttatactatttttattcttaacaacaataatagtaccacaaccatgatttgtcttaagcacaaatgatgtcggtaataggttgaaatcaatatcacaagcatcatcccaaacaccgtagagttccactaaaatactggaaaggccacgctctttcacataatctcgtactagatatttatcagcaagctttgtccaaacagaagtgtcagaattgaatttcaaccaattgattttttcattcaaatttttcggagaactccaattgatttttttgtgagaaatattataatataataaagaagcaagtttttttaagtcacgtttcctataatactcacataaataaacaaaaatcttgcgacgaatgagtacaagaggataaaaaataaccctcaatacattcttaattttttcacaattttcatctttcattattttttaattttataaatattttctttattatactcttttcgtcttctctcaaaccaaacagaaaagcaaaaaataaagtttgaacagcagataaaaatatcaacaaaaataaccaatttataaaatatctactaatataaaaacaaatcaatgcatttaatataaaaacaggaatccccccaaaacaaacgtttctaagatactgcataattgaaagatttatatttatatgtaaaaacaaaatacgtccgacagcacaaattgattcaaacaacacatataccaacattaccatttcggctgagtaccccatttttaaaataatataaactataggtaaagttagaatctttatagtattaatacatatactatagactttaacattacccacagcttgattagccactgccatattcatagttaacaaatcaatctgaatagccaaaagaaacatcctacaaaacatcgttgtataatcaggaacttcccttagccaaatagcaagcaacttatccataaatataaatgcaggtacacttatcattgacatcaacaaaaaagaaaacttacatgagatttctgccaatcgaaacatcttctgtctatcacctgcaccttcagcttttattatttgaggattaatagctgtagttaatgcattagataaaaaattcaactgtccagctacttgattacctattccataggcagcattaatcgcagctgaataaaaattattcaaaagtattgccacaccttgcccacgacctacaatacaacaagtcccatatacattccatcccataaatgagaacatctctttaaacaaagaatattcaaaagttctaaaattaaaatgacggcattcttcatatttctttctgcaataaatataatataatataaaattaaatatcacaagaaataaagagccacaagaataccaaattaatttatcaaatgtaacataaattaaagaaacaacaatgggtactttaagaatggaatcgacaatctgtaccatagatgaataaacaagattctcatgagatataagagatgcaaaatatggagtactaacaagattaaaaaatagagagccaatcattagataatatacaacctttgccacagacagtctttccatgcttatatttaacatattggcaaacacaaaatcagtagcacaaactaatagaacacatataaccaatccaaaaaaaagttgtatacaaagactattattaaagattttaatcaccattggcatatcatttttcccatgatgatatgaaagataccgtatagtggtattagctaaatttatctgaataaaagaaagcatagctataactcctcctacaagattgtatattccataatcttctactccaagattatcaagtacaactcttgaggtataaagcattatagccacttgtaccactgtacgcacgtactgaataccagtattaacaacaacacgcgtagaagaatccattaaaatacattattaatatatgtataaataagtaattattaaggttaaagaactactgttctttaaccttaaatcctaaataatcaagattacatgagaaaagggttagagtctgaattttactatttttatatactcggaaattatatcacagttaacactaagttataccactattactcaatgatctctaaaggatacggattctcctcaatatttttcaaaatatctattaccttcttttgctcagtagataaatctaacatattccagtttttcattatgttataagtttcgcatcgcatggattcttcataaacctcaccataggtataaaccagtaaatggaccttaagcaaagaaacgggaagcttctccagaacattatagatacgctctaaaaccacctgttttttccgctctttatctccataatcataaatggtagcattataccccatcaaaagagccaagcacaaattcgcctcctcctcaacatcggaactctgagcagaaaaaagagaatcggacttaacaagcacttccttattcaaccggcaaaaagtgtcggaatagaccggctcaccgtccataccaagatacatcagctcatgagctgcatgttgaagctcaagagcacgggaagttaaatcattcattattatgatatatgattaaaatataagattatacttatttagaagtcacccgattattttcagataagatttggggactttgatacttgcagtcaaaaggtctttaatacggatgacgacgtatgttttattggcttcgacggcaacttcaccttcaataccgctgagttcgcctttgataacttttactttatgcccaacagtcagaatttcgctatcaaggctgacaccgtcaggattcaaatccattacgaacataaagtcctccatttgcttatccggtaccactagcatggaatgcgtggaaaggtccttcatataaaaaagggggacattataaatgttggaaatatcgcaggctgtctgcttggaggaatgaacaaacaccagattacggattaccggaacttcgctacgcttacggcgatatttcaattgagaaatgacaaaacgcgtgggaagataatagtcaaaatccaaatgctcttccgatttgagtcggtccagagatttccggactgtgaattcctgcttgtcacgggtgcgggctgcaaaccaatatttctgttgttcagtcacttagggatttcctttcgaatgaatcagctcagttccgggtgcgcttcgcggtttgaacgagacattttctcacccaaaccgtattgcacacttttgcaatgataataagctattaaagaagatattagactcatataagtgtccaataaacgttcgtttaatgaacgtctatttttaagaaaataagtagaggcataaaagttaaaaaggaacagaactttaagatgtcaaatgttagatatatactactgttattcagcatattataataaagcaggaaacactttggaaatatttttattaaacattttgttagttcaaaaaatacggcttatctttgcgttcattaaacgaacgtttaaaaaacacctcatcatttccaatatatcattctacattccaacatcttaccctcataaatgcattattgaagttacgtaagtaagtatgtccactgttgcatagggaattaataacgcctaacggccatgaacagctctgctaatggccatgaagcaatcgtttaacgaccataagcagggttgttcatggccgttaggcgtcactaactccagggcttttacagatgaagtacgtagcccgcgcctattgcgcacaaggtgcaaacgtattgtacagcaacttaaaagacattagactccactattcatagtcgggcaaactcgagaatgcaggaaaactacatcgaccgatttatgtaacccacgcgcggtattatggtagaggataataagttacggcaaaactcagacgtttttggcaggtggaagcaaattttgcttccaccttttcaggttgctcccaccgcagggcaaatgccgatgaatagggagatacaggagttgggtggaagtgtggaagcaaagcagatgcaaatttatgtttcagcaacacgcctcaagttttaaaaaagatgtagtacaaagacataatatataataagtgttacaaatacacactttataccccgttactcttgcaaatgtcgaaaaagtccgtacctttgcaatgtgtttttcatagtattagatttaaggttaacaaaggttggagtacagcggtactcctttttttatgcccatacgtaccgtcccggttctccaataaaattttcacataaaatgcaaggcaactttttatatccatttagtttttggctatctttgcactgcttttggcgggcataggcacgcataaagcagcttaactaacaataaatcaataattaaaaacagaaaattatggcaatgcatacatggtttgaatgtaagatccgttacgagaaaacaatggaaaatggaatgaacaagaaggtgaccgaaccgtatttggtggatgccctcagttttacggaagcggaagcacgcatcatcgaagagatgacgccgttcatttcgggagagttcaccgtatcggacatcaaacgtgccaactatagcgaattgttccccagcgaagaggaagctgccgaccgctggtttaaatgtaaactggttttcatcacattggacgagaaaagcggtgcggaaaagaaaacctctacccaggtattggtacaggctgccgacctgcgtgatgcagtgaagaaactggatgagggcatgaaaggcacaatggccgattatcagatagcatctgtagcggaaaccgccattatggatgtatatccgtacagtgcagagcccgacgacaaaccggaagtttaatttaagtgatgagttataagttatgaattattattgcgagccataacttataactcataactcataactcaaaaaaacgatgattgcagagaatttaaaacaagtactgagcgaactgcctgaaaaggtacggctggtggctgtttccaaatttcaccccaacgaggcgatagaagaagcgtatcgtgccggccagcgtgtgttcggagaaagtaaggtgcaggaaatgactgccaaatacgaaagtctacccaaagacatagaatggcatttcatcgggcatctgcaaacaaacaaaataaaatatatcgttccttacgtagcgctgattcatggcatagactcctacaagctgttggccgaagtggacaagcaggctgccaaagccggaaaaaccgtcaactgcctactgcagttgcacattgcccgggaagagaccaagtttggattcagctttgacgaatgccgggaaatgctggcagccggtgaatggagagagctcaagcatatccggatatgcggattgatgggcatggccacaaatacggacaatgacgaacaaatcaaaacagagttttgttctttaaatagcttcttcaatgaagtgaaagccaagtggtttgccgatgcagagtcattccgggaactgtccatggggatgtctcacgactatcacgaggccattgcagccgggagcaccttgatacgtgtaggaagcaagatttttggagaaagaaactattaaccataaaaaatcattatcatggcaacattagaaactacttttgcagggctgaaactcagaaaccccattatcgtcagcagctccggactgacagacagcgccgccaagaatcagaaactatctgaggccggcgcaggtgccattgtgctaaaatcactctttgaagagcaaatcatgatggaggctgactggatgggagacccgaacatgtaccccgaaggcagtgactaccttgtaggatatatccgcgaacataagctgggtgaatatctgaacctgattaaggaaagcaaaaaggtttgcaatatccccatcatagccagcatcaactgctatcagaatgccgactgggtggaatttgccgccaaaatagaagaagccggcgcagacgcactggaaatcaatatccttgcactgcagacggatgtacagtatacatatggaaccttcgagcaacgccacatcgacattctgagccacatcaagaagacggtcaagatacccgtcatcatgaagctgggcgacaacctgaccaatccgatagctctgatagaccagctgtatgccaacggtgccgccgcagtagtgctgttcaaccgcttctaccagccggacatcaacattgagaaaatgatacaagtatccggcaacgtattcagcaatgaaaccgatttgtccaaagccctgcgctggataggcatcgcttcggcagccgtaaacaaactcgattatgctgcttccggtggtatccactcgcccgaaggcgttgtcaaggcaatattggcaggtgcttcggccgtagagatatgcagtgtgctttatcagaattcagctaccatcattgaagaatacatccgcttcctcaacttgtggatggaccgcaaaggtatggaaaccatcagccagttcaaaggtattctgaacgtaaacgacccgaagggagtcaataccttcgaacgtacacagttcttgaaatacttctcttcacatgaatgagacaaaagggtgacaagaagacaataaaaatgaaagggtgataacatcattgcagtgttatcaccctttcattttatacttaccctatctttttatttcttcttatccagcgcctcaaagcaggaattcttgctcacgaactccggaacaatatccttcatggcagcaacaattttcatctggtcataagtgtaacttacatcaatcagcttctggatacgctccttcacctcgtcatagtcatactcacgcaccgtggcaatcataatcttctcatgataggtgggctttgtaagctccttcacattcaagagttcctcgtagagcttctcgccatgacggagaccggtaaattcaatcttcacatccgtacgtccggaaaggctgatcatacgcttggcaaggtccacaatcttcaccggcttacccatgtcgaagatatagatttcaccgccgttgcccatactgccggcctcaagaacaaggcggcaagcttcgggaatggtcatgaagtaacggattatctcaggatgggtcaccgtcaccggaccgccacgctgaatctggtcacggaaacggggaatgacagaaccgttggaacccagcacattgccgaaacgcgtagtgatgaactgagtggcatggcctccctccttttgcaacttcttcgcaagagactgcacataaatctcgcagatacgcttggaacagcccatcacgtttgtagggttaacagccttgtccgtagaaatcatcacaaacttctcggcaccgtatttcacggctagatcggcaacggtgcgcgtaccgaatacgttcacctggatggactcggaaacgttgtcctccatcatcggcacatgcttgtaggcggccgcatggaaaatatactggggcttgaactccctgaagatatcctccatgcgcgtggcattggagatgtcggctatgatggtctcggcatcgatgtcgcgccaacggtcctgaagttccagacggatgtcgtgcagaggggtctcggcctggtccactaaaataagtttatagggattgaacgaagccacctggcgcatgatttcactgccgatggagccggcggcgcccgtaatcatcacacgcttgccttccagatgagaggcaaccttatggatatctatctcgatgggattgcgctgaagcaagtcctcaatctgaatttccttcagctgcgtacggctcagcgcctgaccgttccactcactcaaggggggggcggtcatcagtttgatgttgtgcaccagcaggcggtcagccatgtcggacttcttcagttcctccatcttggcgggagaaatgatgatggtctgcacatcccggtcgttcagcacatcaatcagcgtatcgtcgttagggaacaccttgacacccatcatcaccttattgataagttcaggttcgtccgcaatgaatccgcgcagacggtagtggttgcgcagattgacacgcaatgccttggcaatgttgaccccggcttccttggcaccgtaaatgaacacattggcactatgggtgccgtcgaagttcagcgcctcgaagaaagtcttgacaatcacacgggagcatgccatcatggcaaagctgatgatataggacatgaacagcacgctgaccggagccaggttaaactccaaatagctttccgtcaggacgctcgttatcatcagcagtgcatacgacaccgtcaatgacacaaaaatgcgcatgatatccacaaaggaggaaaagcgcagtacattggaatacgtacggaaaacacggaagaaaatcaggttgacagcaaccgtccataaaatggtcttgtcaatggtagatgattccagaaaaatgcttctgaaatcatatcggagagcataggccaacagactggatatgacgatgataaatacatcaattaacagaatagtccatatcggaagcactttcgcggaaagataccgatgaaaaaaatttcgcttcatttcgcttgacagttttgttttaggcgaggcaaagatacactattttagtcaaaacagacaataaatcgataaaaaaatgttataacaattatttatcgtctataaagaaaccatcccacctcccccgttttaacagtcagaaagcgggatagaaatagttttgccccggaaaatgcggtatccgctacatcagattacttgccaactcgctcaactggctgcgctcccctttcaccagattgacatgggcaaacaaattctggtctctcatgcggtctatcatatagacaagcccgttggactgactgtccagatagggttggtctatctgctgaatatcaccggtaaacaccatttttgtaccttcgccggcacgggtgatgatggtcttaatctcatgtggggtcaggttctgggcttcatcgataatacagtaggtttcgctcaagctgcgcccacggataaaggctaatgcctcgatgaccaattgttcacttttttgcatatcctccaagcgtttcacttcagaggaattggcagcgaactgatgcttgattacattcaaattatcgaacaaaggctgcatgtaaggagccactttctcattggcatcaccgggaaggaatccaaggtctttattggataaggccacgatgggacgtgccagaagaatctgcttgtagtcggtaagttttcccaatgcggcggccagtgccagcagggtcttaccggttcccgccttaccggtcagggcaaccagcttgatattcgggtcgttcaggacctcaaaagcaaagctctgctcggcattacgcggttcaatgccatagttctttgtcttgttgacccggcaaatcgaatgggtaaagggattataacgtgcaagcacactgctgcggtcactcttcagcacaaagcattcgttgggacgaatgatgtccttaaaatcgaactcgttgatgtccagtccttctttggaagaataaatgcggtctatcagcgcagggtcaataccctcgaacacttcattcgacttttcgaatatatccacattgattaccttatcattgatgtagtcttcgcacagcagaccgatggaacgcgccttcatgcgcagattcacgtctttcgtgacaaggatggttttcattttaggctttttggtggaaagccagtccactaccgacagaatctgatggtcggggatgcgttcgggaaaggaatcacgtacccggggagagtccaccatgcctgccaccacaaacagacggcccaagccctctcccaatggcgcccctttggtgaacagattgtcatcggtaatcaaatctagctcacggacaaactcacgcgcattgaaattaatctgctcattacctttcttgaatttgtccagttcttcaaggactacgatgggaagataaatgtcattctcttgaaaattcttcaaacagttataatcgtgaagaatcacattcgtatcaatcacaaaatttttcttagctcccatacacgttagatttaaattgttaatacctttgcataagcttaagataagctacactgcaagcaatttcaagcaagcttgattgcgtccggtttgcattatctttgtcgcttttaaagataacaaattaatagggagaaaggattgcttctccgttaaatattataaaagatggattatcaggacactttaacttacttatataacagtgtgcccatgtttcagcaagtgggcggctcagcatacaaggaggggttggaaaatactctgaccctggacgaacatttcggacatccccaccgcagtttccgcagcattcatgtggccggtaccaacggaaagggttcctgctcgcatacgcttgccgccatactgcaagaagcgggatatagggtcggactctacacctcgccccacctggtggatttccgggagcgcatccggattaacggacagcctatacccgaggaatacgtcatccgttttgtagcgcaggaacgtggattcttcgaacccctccacccctccttctttgagctgaccactgccatggccttccgctactttgcggatgaaaaggtggatgtagccgtaatcgaggtgggactcggcggacgcctggactgcaccaatatcatccgtccggatgtatgcatcatcaccaacatcagttttgaccatacccaattcctgggggacaccttggcaaaaatcgcaggagagaaggcaggaatcattaaaagcggtatccccgttgtaatcggcgagaccactcccgaaacgaaatcggtgtttctggaaaaagcgcaggcgacgggtgctcctatctactttgccgaagagaacgaccgtgaggactatcccggaatagaatacgaactgaaagggctctaccagcagaaaaatgcccggaccgtactcaccgccctcccgctactgaaagaagccggctaccggctggacggacaagcagtgcgcagtggctttgcccgtgtggcggaactgacgggcttgatgggacgctggcaaaaactgcaggactcgcccaccctgatttgtgacaccggccacaatgtgggaggcatcacctacattacagaacaactgaagcaacagacttaccgacagctacacatcgtcataggcatggtgaatgacaaggatatacggggggtactggccttgctaccccgggaagcgacctactacttcaccaaagccagcgtgaagcgggcattgcccgaaagcgaactgcaggagctgaccgcagcagctggcctgaaagggcattgctatcctgacgtacccgccgccgtgcgggccgcacaagaaaaaagcctcccggaagatttcatcttcgtgggaggcagcagtttcattgtggccgacttgttagcgaaccgcgatgcactcaatctctactaaggcgtctttaggcagcgccttcactgccacagccgaacgtgccgggaaagcaccgtcaaaataagtggcatataccttgttcatatcagcgaacaaggacatgtctgccaggaaaacggttgtcttcacaatatttgccatgcccaggcctgcctcttccagaatatgctttatattctccaaggactggcgggcttgcgcttccgcaccttcagccatcactccggtagctgcgtcaataggcaactgacctgatacaaataccattccgccggcttcgatagcttggctataagggcctatggcgcccggtgccttctggctgcaaatcactttcttcatgattgtcaaagtttgtttttattaataatcgggtctattttcttttttctcataaaaaaatccgaagtatatgcagtattccggaaatccacgcattttataaataaaacaacgtaatttcactcataacctgttatacctagacttaactcatttaacacgggggagttccccaaaacagaggctctgcttgcgaaagtagagcctttattctatcccatccctttacttgcaatgcttctctatcaaagcatccacattgggatcacccaattcctttgccttggcaaagctggcacaagcttccttgtccttcttcatctgcagctgggcgatacccatcagacggtaggcttcggcatatttagggtctttctccagagcagccttcagcacattcaacgcctcctcgtaacgtcccacgcgaagattcaccactgccagttcggcacggtaggtcaaatcttccggattcagttcgatggccttcgccatatcgtccagcgcacgctggtactgcttggccttcaaagcagcctgctcacggtaatagtagaacatgtcgctcactttaccgttcacggcattgtaataggcgtcataatccagcatggcattacgcgcctggtctgcattcatacgggcttgggcacgctccagcaagtaaggggcggcttcctccgtatagggctgggtaaagcgggccacacaactgtccatcagagccagtacctcttcggcaggcgcctgcatcagttccttggtcttggcagcactgaagaaggtagccggagaggccagaatggtcttattcactttatcatagctggtaaatgccgacggatagtcctgcttggcaaacaggatgtcaccctccaactggacataaaccggaagttcgtcaatggctatcgctttccgtacctcgtccagagccttgtcgagcgaccagtccttataaactttctcgggcttgcccaatgcataattatagattatcttggcccggttgtaatacacatcatctttctttgcggcaacctccaaagccttatccatgtctgcagcaaccttatccatggaagcatcttcacgggacatgaacagatgctgggaagcacggcgcagataaccgtcggcactggcaggatattgtgcaatgaaatcgttcagagtctccatatacttctccggagacagttgggaagaagccatgtagaggaacaccaaagcctgctcttcggtatcgggcaatgccttcttgataccgatgcccttcaatgacatatctccataagacaatgcggagatattctgcgacatggcgaaattggcatcaatggcatagcagatggtagccgtgtcttgtccggaggacttctgcgccaggccgaagacctgcccgtccacagtcatcagcggacagctcaccatcttgtccttcagacgcatatcgagcgtataataggaatagttgccggaaatcttatcagcctcctttactttcccggtagtaaaagaacggtccttctgggtggaataaggcagcaaatatacatccgcgccgacagccggagccacagcagccaaagtgagcgccgtgactttctttccggggatgccgacacggaacttgacaacatcgtacatgtcatcagctcccataatggcctccaccggcatctgtgccccgtccgagctcatcacaacggcgcgctgggcacctttgaacaaggtgtagtcagaaagcgcaatgccatcttcagtgacaaaaaagccgtttccagtattcagtatcttatcgttctggtcgtaagtcactaccgagaaaaccgcacgtttggctttgtctacccacttcggggcttgtgccacactccactgagccaataaacagagagtgagcatcaacagcaatttctttttcatatcttagttggttctttgttttaccgcttcataaatcaaaatgccggctgcaacggaaacattgagggactcgatggttcccaacatgggaatcttcacccactcgtcacacaacgccaggttgtcataggacacccccttgtcttcggcacccataatgatacacatcggaccggtatagtcggctttggtatagtcgtaatcgcctttctccgtggctgccacaatatggaaaccactattcttgaggaattgcagggtctctttcaagctgtgttcgcggcaaacgggcaaggtgtgcaaggctcccgccgaggttttcatggcatctgcgttgacagatacactgttccgtgcggggataatcacggcatctaccgccgcacactcgcaagtacgggcaatggcgccgaaattgcggacatccgtgatgccgtcaagcatcacaaacagaggattcttgccctgctcgaaaaggaaaggtaccaagtcctccgtcttctggtaagtgactgaagagatgaaggcaatcactccctggtgattcttccgcgtcacgcggttgatgcgttccaccggaacgcgctgtaccggtatcaaagtccctttcaagacagcgaacagctcttttgacaaatcactctgaatgtccttctttaccaatatcttgtctatctcttttcctgcctgaatggcttctatcacggcacgaacgccgaaaatcatttcactgttatcaaccatatatgggtatttactatttgacgatttactatttactatttgatacttccagcaatgctctggcattgttcagtgcggcttcggtcagcttagcaccactcagcatatgggctatttcttccacacgttcatcgtcggtcagacgacggatgtgactgtttgtttccgtctcgttgtcctgcttgtacaccttataatgggcgcgtccgcgggcagcaatctggggcagatgggtgatactgattacctggcggtcctgctcgcccatctcctgcatgatatccgccatgcggtcggctatctcgccggagactccggtatctatttcgtcgaatacaatggtaggaagcttgacggcaccggctatcattgctttgatggagagcatgacgcgggctatttcaccacccgaagctacggaggagacgctttgcaatgtcccgttcttattcgcggaaaacaagaagttcacagtatccgccccgtgtatgcccggctctttgcgggcacctatctctacctggaaacggacattgggcatgcccaacggaaccagccgcgcagccatctgcttctccacttcacgggcagcggcagtacgcgccttggtgaggacggcagcctgctttttcaccttattacataaagcgtcgcaacgcgctttcagttcctcgatgtgctcgtcggacgaagtgatggctgagagtttggcggcgtattcatccgtcagcgccagaagttcaccgacagtggaaacgcggtgcttctgttggagcgtataaatcaagttcagacgttcgttcacttcatccagacgttcggggttgaactctatttcatcctccttacccgacacttcctgcgaaatatccttcaactcgatataagtgctttccatgcgttcggcaagttccccggcaaccggataaaccctctgcaggccgagcatcgtattcaggcattccttcagcccggacaacaagcctccttcgtccgagtagagcatctgccctacccgatagagtccggcctttatctcttccgcatggctcagcgtatctgcctcttgctccagctcctcctgctcaccggcagacaagtgtgcctcttccaactgttccagttggaaacggatatagtcttcgtccgacttatcctgattggcacgggcaacaagggcctccaaatcctgctgtgcctgcttccatgctccgaagatatgctggtaagcaaacaaggcctcttcgttatgcgacaagatgtccaatacattcaactgaaacccctccttgttcagcaaaaggttctgatgctgggaatgcacgtcaatcagctgttctcccaactccttcatctgagccaatgaagcaggcgtgtcattgatgaatgcccggctcttgcccgaagcggacacctcgcggcgcaggatgcattcttcctcgtactccaactcattctcctcaaagaaaggctgcataccgtaagcggaaatatcaaaacgggcctcgataatgcacttcgaagctcctacacgaatggctttcacatcggcacgctgtcccagcagcagaccgatggcacccagaataatggattttccagcaccggtctcacccgttatcaccgagaaaccgctgctgaagctgatatcgagcttttcaataagcgcataattctgtatgtaaagcgaacgcaacataaggatattgacgatttgactatttactatttaaatctttcaccagacggtctacgatgtcggtagccacttcggctttggacttcaaggggtagtccgtctttccctggtggtctatgatactgattttattggtatcgcaacgaaaaccggctcccttgtcgttcagggagttcagcacgatgaagtccagattcttgcggttgagcttgtcttccgcattcatctgctcgttatgagtctcaagggcaaagcctacgaggaggcgccgttggtgctccgtatcgttcttcagattgcctaagaaagcggctatgtcgcgggtaggtttcaagttcaaactcatctccccggtcttttcgcgcttgattttctcatccgccacttgttcgggggtgtagtctgccacggcagccgtcaagatggcggcatcggcatggacaaaggcggcagatgcagcctcgaacatctcctgcgccgactctaccgcatggtactggtgcatcgggaagtaagtgccttgctgcaccggaccggcaatcagtatcaccttggcccctctggcggtacattcatctgccagggcaagtcccatcttgccggaagaatagttgccgatgaagcgcaccgggtctatcttctcataagtaggtcctgcggttatcatcactgtcttgcccaccaggtcgccatctttggcagcaaagtacatttccaggtggcggatgatattctccggctcctccatacggcctttccccaccagatggctggcgagttctcccgtagcaggttctatgatgtggtttccataagagcggagtgtatccagattcttttgggtggaaggatgggcatacatgtccaggtccatggcaggcgccacaaacaccggagctttggcggaaagataggtggtaatcagcatattgtctgccacgccattcgccatcttgccgatggtggaagccgtagccggggctatcagcatggcatctgcccacagaccgaggtccacatggctgttccaagtgccatcgcgttgggcaaagaactcactgataaccggtttgctggtcagggcagagagcgtgataggggtaataaattcttttccggcaggcgtaatgaccacctgcacctctgcaccacgcttaatcagtccgcgaataatatagcatgctttataggcggcaatgctgcccgtaatgcccaatactattttcttccctttcagtatatttgccatttatttctgagtcatttcacgcagacgtatcttggtcagcgtggctttggtattcagggtaaaatcactgttcagaatccagctgtaatagccgggatcgcgcttcaggacatcggataccgacatgcccttgtacttgccgaagttgaatacttccacacctttgtcatcgtagaccatacgaccggcaaagtccacattcttgttgaagctggaatagtcggcaaggaaagccacgtcattctgcaactccggatagcggtccaactgcgacatcagcacttcgtaggtggcacgtgtatcagcctctgccgtatgggcgtcttccaaattcttgccgcaatagaatttataggcagcagacagcgtgcgttgctccatcttgtggaaaatgacctgcacgtccacaaacttgcggcggctcatgtcaatgtccacaccggcacgaaggaactcttccgccaggacggggatatcaaaacggttggagttgaagcccgccaagtcgcatccttcaatgtcattggcaatgttgcgcgccacttccttgaatgtggggcagtcggctatatcggcatcgtagatgccatgaacggcagatgcttcggcaggaatgggcatttcgggattgatacgcatggttttggactcctcattcccgttgggatataccttgaggtaacagatttcgacaattcggtctgagttgatattggtacccgtagtctccaaatcaaaaaagactatcggatttttcagattcaatttcattgttttttcgttttataagctctggctatgagctataaattataagtttgacttacaagccacgagctacaagtaccgtgcggcataattgcgcagccacttgtagctcgtagctcataacccgattgctaatattcatcagtcattcagcatcatcggcatcagcagcatcagcaagtcttcgttctcttcctgctctaccggaataatgacacctgcacgtgaaggatctgccagttcgataacgatttcatcggcagaaatgttattcagaatgtcaatcaggaaagtggacttgaaaccgatgctcatcggattgcccgcatattggcaaaccagtgtttcttcggccgatgtagagaagtcgatgtcctgtgcggagatgacaatcagattctcctgcatacggagcttgataaggctgcttgcctgcgaagagaagatggacacgcggcgcaaagcaccgagcagttgcaggcggtctaccgtcactttataagggttgttctgcggaatcacagagttgtagttgggatagcgaccttcgataagacggcacaccatgcggtagctttccagtgtgaacacagcgttgcgttcgtcgaactcgatagtcaccatgccttgctctttcggcagcagattcttcatcagcgaagccggcttcttgggcaggataaaggcggcacgttcgttacctttggcggccagtgtcttgcagcgcaccagcttatgaccgtctgatgccaccatcgtgatgtcctccgttgtgatatcgaaatagataccgttcatcacgggacgaagctcgtcatcagccgtagcaaacacggcacggttgataccacccagcaacacttgtgcatccatttccacacgtacggcattgtcacccaacatggcagactgcgggaactcgtccgcattctgccccatcaggctgtatttaccgttctgatactgtaccgtgatttcaagggaatccgtattgatttcaaaagtcaacggttgttcgggaatttccttcaaagcgtccaaaagggttttggctgtgacggcaaaacggccgtccatatcactttcattcacttcgaccgtagtgaccatcgtcgtttcactgtcggaaacagttgcagacaaggttccgtcttgcagttcaaagaggaaacaatccaaaataggcaacgcattcttcgaattaatcacacggctgatagcctgcaaatgactggagagcgcagtactcgaaacgataaatttcatatcttctgtatatttaagttttttattttgctaacgtcttagaaaccgtttttatctttttcaaactgacggacaaagttaaaaaaagaattccctacgacaaagaaatagcaagaaaaaacagccgaatattcgtctcatattcctaaaaaattgtaacttcgccgcatcatttaaaaagaaaacaatggaatttacaggaaaaatcatcgctatactccagcccagaggcggagtttccaagtcaggtaacgaatggaaatcacaagaatatgtgattgaagaccatggccaatatccgcgcaaaatgtgttttgacgtatttggagcggacaaaatcgaacagttcaatattcagatgggcgaagagctgacagtatcttttgatgtagacgcacgccaatggcaagaccgttggttcaacagtattcgcgcatggaaggtagaacgcgtaagcactgcctcacccgctccgggcgctcccgttccgccgccggctcccactgccgcaccggaattcctcgcaggggatgcaaaggatgacctgccgttctaagaatatgttataattcaccacagattgcacagattaacacagctaaaaattcttgattatcaaaattctagaataaactgtgttaatctgtgcaatctgtggtgagtgtgtattttgactttcctcgtgcttattttccctcagcactctacagaatgaccgattaatcaccctttataaagcaatacgatattcggataaaccaccccttctgtacaagtgaattgtactgcaagcatgaaatgacggaagaagttggattgacggaagaagaagttcggtatcagacgcacatacgtttcaggctggctcagcatcatctccatatccaccatcatcacaaaattatatatgggtgaaagactgcctataccctcttcgtacaccggtgttccgtctaacacatctccactctccaccgcctcaatataggccgaaaggctcagtgcatcgggagccagcaacagactaccccgatagaaacaggcaaaggtataaagggcagactccgtgatgcccgtcagttgggtgagcagcgtgttacggggcaacacatatttagggaacttccttgctttgggatacaacgaattatttgaaaccattttcggcataagcggagcatcctcttccttgggggtactgtaaagcagatactgcaagcggcgttccgctgccagttcatccttgagagggatacacatcacggcgcaaggcagcttgtccaacgtgtctttagactggaacaagcaagacatcacgctctcgcccgcatgctcattcaagtaagcaatccactcttcgtcacgctgcttgatatagtctgaataggtggccttggcatactcctgactggcagtaaagccaaaccaggaatttctatcagacattgcccagcgatcgtaaaagaaagtggaagacggaagcagagccccggaaaatccgtcctctaccggctgctgcacccgcaaggcattgataaacgtctgtgtggaatccgacccatggctgatgccggagcaataaatggcatcttcattgaacttcatgtcaaactctgcccaactgcccagctgcgtctgcgaacggataccatccgtaggcttccccatatccactcctttcatacgcacatagaccgtggcagccacgttactctgcttgcccgcgtacatagtgcggaaagaagggaggttcatcagggactttttgctgcgccgcgcatcaatcacatgttctatcaaacgcttctggaaacttacaaccagaaaatcgggagtgaagtaggcagccaggaaacgaccgtctgccatgggatagatacgtatctcctctcccttgtaatcgaaatacttggaaggaaacgaactggagcagtatttctccacaaaagattccaccaactcataatcacccgaacccaaactgcaatacaatacttggttcatcggtgtatccggctcgtgaaagctaatcagcatcttgttcatctgtttactcagtccatgcggagtatcctccaccaaagtatacaaatacttcttcaagtaaacaaaaagctccgatacgtatagaaaatgattgtctttgctgcaattcagttcattgatatcctccacgaggtctgccatacggtcggtttcgagtatggctgtggcatcttgcggcaccaaagtataaagattgaaatcctgccggttctccaccgaattcaaccgcaggaaagaatacacaccaaaaccggtacatagcagcactatggacacaacgacagctatctgtatgaggagtcggagtttcatggcatttattcatcaacttttggcaaaaatagcattttctactaataaaacaaaacaaatgtttcaaaaagtttagaaatctatttcaagtccatcgtaggcaaagtgtacatggggtggcagctgcttttcgatatcggcatgaagccctgcatgatggctcatatggatgaaataggtctctttggcaccaatacgtccggcagcctccaacgcctccgaaatactctggtgcgtaggatgcggctttggccgtaaagcattcattaccaaaacgtccaagcccttcaattgttcataagattcctcaggcatcatgtgcatatccgtgatatatcccagccggccgccaatgcggtagcccaggatgggaagcctgccgtgcatcacccgtaaaggcagcacttccgtccggttgatgtggaacacctgccccgcctccacttcctgcagatagatacgcggaactcccggatataccttatcgacaaagcagtaaggcatccttgcccgcagatgggcagcagtgtaggcatcggaatagatagggatatcggcaaaacgaccgaacgggcgcaaatcatccagaccacccacatggtcatagtgttcgtgtgtcaccagtacgccgtctatcttctcaaaagaagaagcacgcagcatctgttccctgaagtcaggaccacaatctatcaatatcaccgcatcatccgtatgcagcagggatgacgcacgcaagcggttgtcccgcgggtcagtggaagtgcagaccggacaagtacagcctatctcaggcacaccggtcgaagttccacttcctaatattctgagttttcccattgactaaatcaaataaatttctaaaatcaggttatatacaacaatgtttgggtgtgtcaaaactctcttactattttatcaaacaaacttccgggtgaatatcaatgccgaatttctcgcggacagaagcccgcacggcatccgaaagagcgacaatatccgctcccgtggcaccacccgagttcaccagcaccaacgcctgccggccgtgcaccgcagcaggccccagcgccttgcctttccagccacaccggtctatcatccaggcagccggtatctttacccgaccggcatccacatcatagtggggcatgtccggatattcccgttgcaaagactcgaactgccgacgcggcacgatggggttcataaaaaaactacccgcattgcccagcaccttcgggtcgggcaacttgctttgacggatgtctataatcacgcggcgcaaaatttccagattcagcaccggatatttctccagctcctgccggatagtaccgtaatccaatgtataatgttcccgtttactcaagcagaagttcacgtaagtcacaaacacggccttcatctccggttgcttaaacaagctctttctgtaggagtagccgcattcatccaccccgtagatacgcttctcccttgccatatttatggtttccacggatgttatcaggtcctttacttccacaccataagcaccgatattctgtactgcacttgccccgacctcacccggtatcagcgaaaggttctcggcaccataccaatgtcgtttcacacaccaagccacaaaatcgtcccataccacaccagcacccacacgcacccacacgtgctcctcatcctctgacgtcacctccaggccaccgatacgtgaatgcagcaccgtgccttcataatccttgataaagagcaggttgctccctccaccgatatgcagccagggcgcaacgacctgtcctgccgcaatcagctcccgcagttcatcctccgaaccgtattccagaaatcttgcagcagtaacgtcaattccaaatgtattgggtatcttcctcaaacctttcctcctttattttaaatgctcgtgtcttcatatttgtacagctcccatcccttactgcgtttgcggaaatagaagatattggagtatccgttgcctatgccatttaccttcagtattttggtgtccgacaagtcctcattcttctgtccgtaattgatattagacagtctgtcggcaggcattaccggacggaaggcataccactggtccacatccaaagtggtttccaggatagagaactcgtcgtcagggtctatggtgatgaattgtagcggatggctgatatgcttgctctgatagacactgtccgtcacaaaacgggtatagaattccacgaagtcctcattttcgcctttctccatctcgcgcaggttgatggcttcgagcatccacattccccgcttcttctcaaaataataacgcttcatcatacgcgttttcaagaaaatccactccacttgtaccgatgtcagcgtagtatcgcccaccatgtccatatcctcttccttatcaaaaagcaaggtgtaatagttctgcttggtaaacagataatcgtgcttccagaagtccgcctctatcttcagcggagtgtcacggtcataatagggcaaaggaaataccgtcctctgcctttgcagagcatcatccgaagcataattgaagataaaatcatcaaacagctcgtctgcctccatcggcttcggttcttccttcacttctgcttccagcagcgtatcggccttgtgaccggccgaatccaccatttccgtaatggtagcaaagggatccattttcgcctttttgtttccacacgaaatcaaaaaggcgaacaacaaaaatcccaataaaagttttttcattctttacggaccgcttacggtcacttgtttaatttagcccttaatttctcaagcatgtctacggtcatggactccaggtcgtactgcggcatccagtcccattcctcgcgtgcacaagagtcatccagagagtcgggccagctgtcggcaatggcctgcttcagcggatcaatctcgtatgccatctcaaaatcaggcatatgcttcttaatttcctgataaatctgttccgggtcaaaactcatggaggcgatattgaaggcgttgcggtgcttcagccttgccggtgccgcttccatcagcgagatggccgcgttcagtgcgtcgggcatatacatcatatccatatacgtgccggccttcaccggacatacgaatttttctcccttcacggcagagtagaaaatatccaccgcatagtccgtagtgccgccacccggaggggtcacgttcgaaatgattcccggaaaacgtaccgagcgtgtatccacaccatattttgtatagtaatagtcactcaacaattcagtcgtcacttttgtcacgccatacatggtacgcggacgctggatagtgtcctgcggtgtctttacatgaggcgtggcttcgccgaacgagccgatggaactcggggtaaacacggcacaattgtactcgcgcgccacttccagcacattccacaacccgtcgataccgattttccaagccatggccggacggctttcggcaactaccgagagcaaggcggccagattgtagatagtatcaatcttgaactgacgcgccaccacctcgatggactgacggtctgtcacgtcggcaatggccgaagggccggatgctttcaattctcccttgggcatagcactcggaatgtatcctgccacaacatggtcatcaccataacgtttgcgcaactccagcgtgagttccgacccaatctgtccggtagctccaattaccaaaatattcttcatacgagttatttataaggtttcgttattatatatggtgcaaatatacacacttttttttcatatttctgccatattgatattgtttattccaagaaaaatgatgttctttgtgggaaatgtaatgacaacgtattacctaaaaaataaaatgctatgtacggtaaaatgaaagaccatctcagcaagacacttgctgaaataaaagaagccggactctacaaggaagagcgactgattgagagtgcacaacaagctgccatcagcgtaaaaggcaaagaggtgctgaacttctgtgccaacaattacctgggactgtccaaccacccgcggctgattgccgccgcccagcagattatggaacgccgcggatacggcatgtcgtccgtacgcttcatctgcggaacgcaggacatccacaaggagctggaagcagccatctccgactacttcaagactgaagacaccattctctacgccgcttgtttcgacgccaatggcggtgtgttcgagcccctcttcaccgaggaagacgccatcatctcggactccctaaaccatgcttccatcattgacggcgtacgcctctgcaaagccaaacgctatcgctacgccaatgccgacatggccgacctggaaagatgcctgcaggaagcccaggcacagcgtttccgtatcgtagttacggacggggtattctccatggacggcaacgttgccccgatggactgcatttgcgaccttgccgagaaatacgacgcgctggtcatggtggacgaatcacactccgccggcgtggtaggccctacgggacacggcgtaagcgaacaatacggcacctacggacgcgtagacatctataccggaactttgggcaaagcctttggcggcgctttgggaggattcactaccggacgcaaggaaatcatcgacctgctacgccaacgcagccgtccgtacctcttctccaactcattggctccgggcatcatcggcgccagcctcgaggtattcaagatgctcaaagagagcaatgccctgcatgacaaactgctggaaaacgtgaactacttccgcgacaagatgaccgccgccggtttcgacatcaagccgacacaaagcgccatctgcgccgtcatgctgtatgatgccaaactctcccagatttatgccacccgcatgcaggaagaaggcatctacgtcaccggcttctactaccccgtagtgcccaaagaccaggcacgcatccgcgtacaaatctctgccggacacgaaaaggagcatctggacaaatgtatcgctgcatttattaaggtggggaaagagctgggagtgctgaaatgagtgatgagttatgagttataagttatttgcttgtgctttcccttgcggatataagcccttcatcaacaaataactcacaacttataactcataactaaaaaaaatcccgcgactaaaattagccgcgggatttttttagtttctctcttatctgcgttctcccagttttgagtcaacgaagaagattccggcatcaccggctttctttatcatatctacaatgccgtcggcagtagcttcttcttctacctgctcgcgcacgaatccccaaaggaagtcttgtgtagccttatctttttcggcagaggcaacatctaccaattcatcaatcattttggaaacacggcgttcgtgctgggctacctgctcgaacacttccagtggagtaccgaagtcattgggaacaacatcaatcttgtccagtttggccttaccgccacgcttgatgatataagaagccatttcacaagcatgagctttttcttcagaagcctgcttcttcaaccaggaagccatgccgttataaccttctttctccatatagaaagacattgccagataaaggttggaagaccacatctcagccgtaatctgctcattaattgcattctgtaatttttctgtaatcataatcgtatttatttaaattgaaatcattacaaaagtaacaagaaaccttaaaagttgttcacgcaataacattttttatataaaaacagaagccttggtataataaatgcttcgccattcatgcaacgcatctccagcctctctataccagctcgtccgacgtatatccttgaggcagctcacggcagttatagcccgaagccataatttcgccataagcccctgccgaacggagggcgataaggtcgccacgcttcaccccattcaaatcaatagccttaccgaatacatcagaagactcacagatgggccctacgacatcataagcctgaaccggcgcatccgaagtgatattctctatcttatggaacgcttggtagagtgccggacgaatcaaatccgtcatgccggcatccagaatggcaaactgcttgttggtgccctgcttcacataaagcacctgcgaaatcaatgaaccgcattgtcccactaccgcacgtcccagctcgaagtggagcgtctggtggggacggagtttcagatggctgttgtaagtctcgaggtagcttttgaagtcgggtatcggctgacggttggggtgaccgtagtcaatgccgagtccgccccccacattgacgtgctcgatgcggatatggcgagcttccagcttatcctgcaattcgttgacgcggttacacaaagccacgaaatcgcccatatccaatatttgggaaccgatgtggaaatgcagtccgatgaatctcaggttcttcatattctgcgcaatgtctatcacatggtccatatcctgcatgctaataccaaacttgttttcggccagcccagtggtaatattggcatgggtatgggcacctacattgggattgatacggaaagccacattggccaccttatctttagcggcagccagctcgttgataatctccagctcggggacagactccacattaaagcagaaaatgtcataatccagccccagattgatttcccaatcagccttgcccacccctgcaaaaacaatcttgccagtgggaaaacctgccttgatggctgcacggatttcaccgccacttacacagtcggcacccaagccgttctcgcggataatggcaagcaccttgggattggcattggccttcacagcataatgcaccgaatagttgccatatcgggcagcttccgtacggatgcacgaaagtgtgtcgcgcaagacctttgtgtcgtagtaatagaagggagtacgcaattcgcggaatttatggatagggaatgttcctttcatataataatcgtaatctttgtttagtttaaaaaaaggaagatgaaagaggtgtctacaaataatttttcagacgcagatgacgcagattacacaaataggaagcaaaaagaatctgcgtcatctgtgtaatctgcgtctgaaaaatatcaagagttattcctcattgaacagcgcatcactgagtgactgcaacgctgccttcttgtcgcactcgcggatgaggaaagaaatattatagttgctaccaccgaaagaaatcatacgtaccggtatgtcgcgcatggcatccaatgccttggcttcgaaaccgacgttttcccattcgaggtcgcccaccacgcagatgatgcacatgtccttgtccaccgtcactgtgccatacttcttcaagtcatccagaatttcattgagatgcttcacattatcgatagatacggacacacccacttctgaagtacaaatcatatcgatggaagtctggtagctctcgaatatctcgaaaaccttacgcaagaatccgtgagcaagcaacatgcggctggattttatcttgatggccgtaatgttgtccttggcagccaccgccttaatcttacccttctccgtatcattggaaatcagcgtacccggagcagtggggtccatcgtattgagcagacggacggggatattggcatacttggcaggctggatgcaggtagggtgcagaatcttggcaccgaagtatgccagctcggcggcctcttcgaaatgcagatgacgcaccggcgcagtcttgtccacaatacgggggtcgttgttgtgcatgccgtcgatatccgtccaaatctggatttcggaagcgttgatggcagcaccaatcagcgaagccgtatagtcgcttccgccacgctgcagattgtctatctcgccgtaggcgttgcggcagatgtacccctgagtgatataaatctcagcatccggatgcagttccagctgaacctggagcttgtccttgatatagaccggatcgggctcggcattcttgtccgtacgcatgtattctaaagccggaagcaacacagacttcacgccgcattcctgcagatagtagttcatcatggcggtggaaatcaactcgccctgagccaacaccactttctcctcaaacagagtgaagaggtctttggtataagaacggatatagtcaaaatgtgatttgatgagttccaggcctttctgtttatactccggagtagcaaagagttcatcaatgtgctggcgatatttactttccagcttgttgataatctcgttggcaccttccggattcttcttgtacagatagtccgaaatctcaaccaatgtgtttgtggtacccgacatggcagagagaaccacaatcttacgttcaccatcggtaatcaatttggccacttccttcattcgctgagccgaacctactgaagtacctccaaactttaaaactttcattttcgttcctgtattaattagtttatagttacaagctacgagctacaagtaggcagctgcggagctttatcgttaatttctgttctttataagaatcagtagttagagataactacttaactactaatcattggttattgcaggggcgtattctgctgtaacatcagtcatcagatggtctgcgcaccggtacaccttgccgggaaactctcgcagcagctgcaggttgtgcgtggtcatcaccaccagtgcgccggcttcactgatgccgtgcagaagttctgcaatggcatgtccggtttccgaatccaggtttccggtaggctcatccgcaaggattatctccggagagttgagcactgcacgcgcaatcacaatgcgctgttgctcaccacccgacagttcattaggcagcttatatcctttgttgctcatccccaccaggttcaacacctcttctattttgtccttaatctcccctttgctcttccaaccggtagcacggagaacaaattcaaggttatcgtacaccgtacggtctgtcagcaactggaagtcctggaatacgattcccagcttacggcgcaactgcgggatgtgcttacgcttaatatggagcatgtcataccccaatacttcagcctcgcccgatgcaatatccagttcgccatagaaagtcttgagcaggctcgtcttgccggagcccactttacctaccaggtacacgaactcccctttgtgaagttccaaattcacatcgttcagtacgcacaactcctgctggtgtatctctacgtccgtatatcttatcagcgcctcgcccacccccattttaattattaatttttaattacttaatgtttcttccacgtcgcactgtgacgttcctccaattcacgcgcaaggtcttcaatgcggtatcctttggatgtgagcagcacgatgaggtgatacaacaaatcagctccttcataaatcaggcgttcgtccgtaccgttgcaagcctcaatgacggtttccacagcctcttcgcctaccttctgtgccattttgttgataccggactggaaaagactggtcgtataggaaccttcgggcatttcatcataacgcttacagatgaaatcctgaagaagctttagaaacataaccggctgttcgttcttctcaccccagcaagtatctgtaccggtatggcaaaccgggcctacgggatgtacctgcaccagtaacgtatcccggtcacagtcttccttcatggaaaccacattcaggaagttgccactctcctcgcctttcgtccaaagacggttcttggtacggctgaagaaagtcacctttccagtttccaccgtcttgtcataagcctccttgttcatgaagccaagcatcagcaccttagcggtatctgcatcttgtataatcgccggaacgagtccgttcatcttgtcaaaatccattctatttacgatttagctatttactatttacgattgatattactttaagtgactggagacttatgatttgcttgagtaatcccaatcgtaaatcgtaaatcgtccaatcgtaaactcaccttcatcttctcatcgcaattccttgggcacaaagatacgattttaattcgggaattttgatttctccgaaatgaaaaacactggctgccagggcagcatctgcttttccctgcaaaaagacgtcacgaaaatgttctttggcacctgcccctcccgatgcaatgatggggatggacaatccgtcggcaaggctggaaagcgcttcattggcataaccggtcttgacaccgtcgtgattcatgctggtgaacaatatctcgcccgcaccacgttcctgggcttcttttgtccacgcaaacagttccttatccgtttccacacgaccaccgttcaagtagcatcgccatcccttctctgtctgtttggcatcaactgccagtacacaaacctgagaaccgaagttcttcgcaatctcgtctatcaatccgggacggcggatagctgaggaattgatggagattttatcggcacctgcattcagtagcctatccacgtcacccagttcatgaatgcctccacctacagtaaaaggaatgctgatattcgcagctatgcgtttcaccaattcagtgaaagtcttacggccttcaaaactggctgtgatgtcgagaaaaaccagttcgtcggcaccctgctcactataagcacgcgccagttctaccgggtcgccggcctggcggaggttcacgaaattggtacctttcactgtctgcccatctttaatgtcgaggcaagaaatgattctttttgctaacacggcggtttgagttataagttatgagttataagtgattaattttcacctttcaactaacaaagttttccagttctttgaaggtgatgcggccttcgtacagagccttaccgaaaataacggcaggtatgccgacaacttccaaatggcgtatatcatcggcacagcttacgcctccacttgctatcagatagagttcaggatggtgctccagtatctccttatacaacgctatcgatggtccttgcagcattccgtcacaactgatatcagtacagataaccttacggacccccttctctacatagtctttcaagaacggaaacagttcgcagccactctcatccttccaaccattgacggctattttatgctctttcacatcagcgccaagaataattttctcggaaccatacatttgaagccatttgcagaacaattcgggattcttcacagcaatgctgccaccggtcaccatctgcgcaccgttctcaaaagctatcaccaaatcttcatcactcttcaccccacctccaaaatcaataataagagacgtacgcacagctatctgttccaacgtacggtagtttaccacatgatgggaagccgcaccgtccaaatcgaccacatgaagtctgcggataccatgagcctccagctccagggccacttccacgggattttcgttgtacaccttcttgctgtcataatcgccttgggaaaggcgtacacattttccgtcaataatgtcaatagcgggaatcagttctatcattttatttacgatttgacgatttacagttccaggaaattccgcaaaatacgctctcccacacttccactcttttccggatggaactgtgtggcgtagtaattgcctttatgcaaagcggcactgaacggatgaatgtaatccgtcacggctgccgtacaatcattgactggcacatagaaactatgtacgaaataaacaaactcttctttagtaaagcctttaaaaagtccgctattcgtccgggcaatggtattccatcccatatgaggtactttatcctcgtgcctctgcgaaatgaaacgtttcacatcagtatcaaaaatacccaggcaatccacatccccctcttcagagtggcggcacatcaactgcatgcccaggcaaatgcccaataccggctggcgtaactcctttatcagcctatccataccaccggcacgcaaaaagtccatagtggtttccgcctctcccacaccgggaaagataaccttatcggcagcacgtagcacagcctcatctgccgtaatcactgcctctactcccagacgcttcaaagcataatccaccgaacggatattgcctgcattatatttgacaactgcaactttcatttttttaattgagaattgaccattgaaaggtaataattgaaaggtaatgacaagttccccaccatcaactatcaattatcaactatcaactaattaaatattaccgttttgttcttatatgccaacaccttgcgttcaatatgcttctgaacagcacgagaaagcacaatcttttccaagtccttacccttgttcaccaaatcctgcacagtgtccttgtgtgtaatacgcaccacatcctgctctatgatgggaccggcatccaactctgtggtaacatagtggctggtagctccaataatcttcactccacgttcaaacgcagcatgatagggcttcgctcccacaaatgccggaaggaaagagtgatgaatgttgattatcctattgggataagcgtttatcatttgctcggaaatgacctgcatgtagcgcgccagcactatgaaagttatcttatgctttgccagtaactccatttccttcttctcttgttcctcctttgtctctttggtaatggggaaaagatggaaaggaataccgaaacgctcggccacgtgctgcaaatcgggatgattgcttataataagaggtatctccacattccactcaccagcggtgtaacgcgccaacaagtcgaacaagcaatgggacatctttgaaacaaagatagccatacgcggttttgtatcggagaaatagagacggaaattcatctcatatttctgtgcatacaaagtggcaaaataatcctcaatcttttcctgaggcaccagaaaatctttcaattcccattcaatacgcataaaaaagatattctctacatggtctacatactgatccagatagataatattacctttattcaccgttataaagtctgttacttctgccaatatgcctggtttgtcagggcagtgcagcaacagtttggctgttttcatcatcctaaaatgttttttatcatttttcaaattacaacattctcgttttgagtccgcaaaaataacgatttattgcaaaacaacgaacttttcgagcaagaagtttaaaacaagctccgaaatgtttcgttttctccaggaaaggttttcatatcaagaataaaacagtgcataaacgtatttctaaacagttgttaaattaacttttctcttatttttccaatcttctcaatatgaggatataaagcaaatacagcacaaaacgcttggaaaaaagttcgccatagctattgcagatatcaaagaaatgcctacctttgcaaccgcaatcaagagagatagcaacgaaagaatgaaataatggtgcgttagttcagttggttagaatacatgcctgtcacgcatggggtcacgggttcgagtcccgtacgcaccgcgaaagcaaatagcaaattaaagcaaagctctgaaattcaaggatttcagagctttttctttttctcgctccggcaaaaatggggacccgaaatatccggtgcataagcaattttcgagtttcagctttctcagacttacatcacaagaataagaaactgagcagcaatgaatgggcagaccgtcctccggatagggacaaaactggaagaaggtataggcagaatccacgtatgtcccatgctttttattatgaaggttcatgtaaaccctcgtcccacgcacgtgggctcaacggttcacgcaggcaaaccggcgagcacacatgcgtgggacgaagttttgtaataaggtttcgggaattatgcgccaagcttctctgcattacacacaggacatgaagggaaaaagtgcccatatacggggagcaaaagccatacttccggcactatagacaacggagttcgccccttaatcaccatatttgcacaaagaaaacggaaaataagcccgaaatagacattaacaaatgttatttattataaacgaaaaacagaaaaaaaacacgtggttaaattcttgctgtcagatagttaaagccgaatatgagaagaaaaagtagtgctggcaaaaatgatgatttttaaaatcggggtctgacttacgaactacaactgcatgtgtaaaataggatattctttaccttctccgtccaaatcagaccttttgtatacgttaaagcctatatatttataaaaaccgacagcttgaatattctgctcgttcacatcgactttcgttacctgcaaatgatttatggcataagtaaccagttttttcccaattcctgtgcctcgataattattgtcaataaacaacatttcaagatttccttctgcaattcccataaatccgattaagattccctcctgttcaaatccgaatagagtgacatactgaaaatataccggaagctgttccttatagtatagacaatcttcctctttaagaaaatcatgtgtactcaatactgcactttcccaaatttctatcaaacgtggataatccgtaactttaatttttctaatcataattgtaattgctatttaaagccgcaaagttcggaacttatacattcaatgcactgaacccaggttaaaaaatacgtttacggattctgcttagtgcttgcggcgtgatacccaaataagaagctatatctttgagtgggatatagtttaatgtaatgccatattcttcaatcatctgtagataatactgttcaggagaatatttaatcaagtcgatatttcttttcaagagcttattcagtagtatggcattcaaatcttcaaatacggttttcaccttaggaatagcagtatacagttcatctactcgcttcttgtctattcggtaaataacgctatctacaattgtctgcacattaaatgcagattttgtttgtaaggtaaaagatatgttcgacattgaaaacgtaccttctttacaaaaccaaaaaatctgctcttcccctttatgattcaaaagccaacaacgtaacatcccatcataaacgaaataactatatctttctatttctccttccttaatcaaaaatgtatctttaccaatcaatatccgctcaaaatatcggtcaaataacttagattcctccaaattaaaagtattgatgctaaaattaaattctttaagcagtttttctaaaagcataatattcactgactatagttttcataagttttgacagccgatttttattccacaataccaaaatgaaccagagcgttccggataccatgctcatccaccgtctccgttatataatcggcaacgcttttcacagcctcggaagctcctcccatagctattcccatcccggctgcacgaatcatggaaatatcattcccgccatcaccaaaagcgatggttcctgaaacatcaaatccataataggaagcaaactcattgatacccatagccttgtttactcccgtcacattgacatccgcaaagaaagggttccatctggaaacagaaagtccgggaagttgtgccataacttctttttccatttcttcatcacaatatatgcataactgacaacattcgcctcccataaattccttttcaatgtctgccaccggcggtgtagggtgattgaccagcctagccaattcgatgacggtcggattgagttcgttgacaaaaatacctttattcgtttcgatagccagagcaaacccataatgttgagccaatactagtaccctctgaaaatccttttcgggaatctgtttacgagatataggagtgccatctctcagtacacaatcggccccattcaaagctatcactgcatcgtatggaatctcttcaagttcgtgaagatcggtaaacgccctcccagttgctattatgatttttataccggattcatgaacttgctgcaacgcttcgatagccgactgcggaacgcggtgagtgtcgaaactcaccaatgttccgtctacatctaaaaatatagctttggtctccattataaaatattttggtctaataaattcattctatctgcatcatctcaattttgtgaatatctatattcattcggtgcaactcccgttgctttcttaaacaccagactgaaatattgcacactcggatagcccagccgacgcgctacggcagcaggtgtattaccaccttccgataacattttcttggccgtgtacaagcatttgaactggaagtattcagccaatgtcttacccgtctcaaacctcagcaaatcatcaaagtaagccgtcgaaagattcagtttttcggcacagcatccggaagtgggcagcttcccctcctgcaactttccggaagtgatatactcgtccaatatcccttccattttccccagaatcatcttgttcttattctcacgggtgatgaattgccgctcatagtaacgtgagcaataatccagcagcaattcgatgtgacgggacaagatggtattgctatgcatatcaatggaatgatgaagttcatcatcaatattctcaaggcaacacgtcactttggccgtttcgcgctgtgacagatgcaacgcctcctccttgcggtagaaaaagaaagtatagttgtcgatatgattctttaacgtagtacaaagcaataaatcgggatgaaatgccagcagccaacctttgtccggaagcgtattgttcttgttcatccggaatatctcgccgggagtaagaaataccatcgtagcattggaataatcataatatttccgtccgcagcagtcacaatccccttcacagtcctcaatcagtaggatggcatagaattcaaacttcacagcatcctgatacacactaggattttccagattaataatgcttacctgaggatgcaacgttttacatcccaggcaccggttacattcacatacggtctttatgtccaatgtattgtctttcatcacctataaagtcattctcattattgtaacttcagatatataaaatcttaaggatatgttttccacaccttcacaatataccaattacaaaattagaggaaaatccagacatcttcactacccttattacggattatataaccttagttactgtttttatatctggctacgtgacttcatctccagatacttgtttatcacgtccacagaaagattttccggtgtagtcagtacagaactgatgccgtgctgcttcaaggtggagactatcagccgtttctcgaatacaaatttctcggcaatgacatggcggtaatacccttccgtatccctcgcaggagtggcgacgtactctttcagagcggcatcttcgaagaagatgaccagcaaccggtgctggcggttcaactgctgcaaataagccaactggcgattcaagctgccgatgccggaaaaattggtatacagcaccaaaagactgcgtttgttgacgcgcttgttcaaatgtacgcacaatgaggaaaagtcggtctccccaaaagtagtctgctggctgtaaaggttctccaataacgcctgcatttgtccgggctgtcgggaggcggggataaatgtatcaaagtgctcattaaacgttaccagtccggctttatcctccttccgcatgacaacgtacgaaagaaccagggaggcattaatagcatagtccagcaaggtcatcccgcgaaatgcctgctgcataatccgccccttgtctatcacgttatagatttgctgggaacgctcgtcttgatagacatttaccataagttcgtgcctccgggcgcttgctttccagtttatcgtgcggtaatcgtcgcctttcacatactcctttatctgttcgaactccgtatgatgccccaccctgcggatacgtttgatgcccaattccgtcaagttgtcgctgatagcaagcaactcataccgatggagcatcagataggacggatataccttgacatccagcggagcatcgcaagtatatctgcggaaaagcaatcccattctgcctgccacaaacacccgaatccgtccgaaagagtaaatcccccgccgcgtaggacgcagatgatacgtaatcgtcctgccctcattcgcctgaagcctcatccggaaatcaatattccgcaactggaatgcaaaaggaatctcatccaccacttccacagccaccggatgcggataactgctctccacacgtatgttcacggtgttttcatctccgttggagaagcgggtagcacactggcggaatgcccggatgccgcgaatacgatagagcatcaccccatccaccaacgccgacaccgccaaaacaaaaagcgcccactgcccgattgcaaagaatggagcaaagacgtacccgatacccgtcagcaggactatcagaacaagagcaatatagaatcggcggcccagtctcacttcggcacttccaccttatcaatcagacgttgcgtcacctttaccggcgaatagccttccatctcggcttccgctgtcaatatcaagcgatgctgaagcacatacggagcaacgaacttaatatcctccggtgtcacaaagtcacgtccctgcaacagtgcatatgccttggaggcctgcatcattgccacggacgcacgcggagaagctcctaaatatacagccttgctggtacgcgtctgctgtacaatcaacgcgatgtactgaagcagcgtgcggtctacaaacacgtgttccatcagcctgcgcaacgaaagcagttcttcttttgtgagcacgggcgtcaggctctccaacttcaccaacgaagcattggcgtggtggcgctccaggatgtccacctcctcctccaatgagggatatcccatggttattttcatcaggaagcggtccagttgcgcttcaggcaacttataagtcccctcctgctccaccggattctgggttgccagaatcgtatagagttctcccatctgatgcgtggtaccgtcaatgctgacctgccgttcttccataacctcgaacaaggctgcctgcgtcttggcgggagcgcggtttatctcgtccaccagcacgaggtcggcaaacaccggtccttgatgaaagccaaagtcattggttttcatgttgaagaccgtagtacccaacacatcactcggcatcaagtccggagtaaactgaatgcggctgaagtccgccttaatcaagcgtgccactagacgggcaagcagtgtctttgccacccccggcactccctccagcaacacatggccgtttgccaggacagccgtcagtaccaggtccactatctgctcctgccccactatgaccgtagcaatccggtccttcaacgcttgtatcttctcggaaaagagagtcaagtccacccgtttttctgtgttctcttccataaatatcttctttatatatgattgattatttcattcattttatcgacaagccgtttcatctccttctcagagatgctgcgccctccgtacaccaccggcctcacctcgcggatgaacacggctatttcccccgcttccatacccgtcttccgggcaatcctgccgaaagagcgctcatcctctgccacttcctccacatccacttgtatttccctcctcagttcctccgcaaaatagagatatttcttgcggactaagtcagcatggtccttcttctgataataaagagtacctatcaactctgcaaactccaaagacttattttccggttcgcggataaccggaatggcgcgctgcttcctgcgggctgtaaatatcataaagagcaggatggaaaccatactcaagtacaatgcccagcgaagcgacggctgcgaaaggaaatagcgaaaagaagacatctgtacctgggctgtttctttcatatagccttcggtacggacaatgggaaatccacccatctgggacaatatacgaaaaagataagccgcattcttctcatccagcacaccatagttcgtaaaaagcaggggagtggaagccagtataacttccccctttccccaagaaaccgacatggcaaccggatgagcagcttctccggtaacagttttttccgccaacactttactagaaatggaatctgcaaagaaataagactgacaaagttggggatagaaacagaaagtctgctgcggataaaccgccgaatcccccacccagcacaaactgtctttcgaaagcaatgcagtggcatattttttcaaagccgacggactgaaataggaatagctgcactcaaatcccagcgtatctttcaaaatacggctgaaagagctccccgccagcataatccggtctccccgtcccgccatcttcaacatcgcctccacatctacatccgtcaaatgcaggttatcggtaacaaccagtattccgcggcggagcgtcgtatcttcctgctccagttcataaaaagtctttctcgacaacgaatatcccttcggcaacgatgaagacagcaggctatcgaacacggcacagccgaacggttgcttgtcataatggctgaacgtagggttccagacaaacttctttggcagacggcactctatcgcaaacatcaacaccagaaaaacaatgataccggctataaaccaatggttccccttcatgccgcccctcctttctccacttctttctgcaaatcccgcatcgcatggaacaaagtttcggtcgcttcaaaatttccgtaacgtactcgtagaaaatggttggtcatttggcggaaagctggcagacggacttcatagatatattgtgtaggcgttttatataactgccagtctatacgttttccatcgctgagctgtttcagcgtctgcagatagagtaaacgcaccgcctcccgataatccgtccgggcaagcgcatcggcaattctttccgcaaaatccactccatagatggtatcctcccccactgtatagggcagggtactcttgcgcgaacgcatgaacagttccggacgcttcttgtacacaaaccaaatgaccaataccaggataagaacggcaatgcatatcaatacgacctccgaatattctgccaccaacgtattcccgaatatcttgtccagcagcttgccgaaccatctgctgaaccactcaagtacattaatttcgggagctatcaactcacgactgtaagcaaacgccgggtcagactgccaagcggcaacctgtgcagtatcacaaaccagtgtatcagccggagccatattcatagtccgttatcagagtttatcaaaattgtcaatatcactctccaccatcacataatctatcttttccgaagcatgaccgtattgataagccagtcccagcaatgagaaaatcatggacatataaacgccgaatgcctggaccaccgccagcagataaagcacaaagctataggctgccgatacagtagcaccgccacctgcatcagtcattgcaaagatatatttcacaatagtcccgatataccatggaatcatcgtcactccctgcaagatggcggcgatgaatcccataacaatggaaatcagtacgatacctccccaggtagcgaaacccagtcggtaggccttcttcaaggcatctatgatatagatatcttcgaacagatagactggagtccaaatagcaagtggcacagacaccaccacaacgagcagaacgaacaagaacgcaatcgccatgaacggaataacggtggctataaaaccaacaataagccctacaaacagcaccaaaagcacaccgacaatcattatcagaaatacccttctgacattacggaacaacaagggcttcagcatccctaacgtcactccctccaagcgtttttcccgttcattgtaagtacggaccaatgcgtagaccaaagaggtcagcatgacagttcctagcagatagagaacggcatacagactgtaataagtcaccagtgccatgatggacgctccgacaacagaagagtcgaacgagcctccggtcatatcacccagagccattgtaccgctcatcagcccgttcaagctcagtccctgaagcagacaaagcggcaacatcagatatgtggtgaatttcatcaacggcttccaattctctttgataaaatcaaaggtagcagttagtttctctccaaaagaacgttgtacatacagtgcgattttaggtttctgtgcttccatgcttctttctgttaggtaaataaatataataaaaaaagataaacgacaaagagagtagaataaagccgaacctcaaagcatccggaagttcggtatggcgggtaacgaatccttctataaatcctgccatgatgaatacgggtaccgtacccaccactattttcagtccttttttggctccccgtttgaaagattccagccttgaataggttccgggaaagagccatccgttgcccagggcaagaccggcggcaccggctacaataatcgcccagatttcgagtgtcccgtgcagccaaatggcaaggaaggactcccaaagcaagtcgtgctgataaaagaaggtttggaaagcccctatcatgataccattgttaaggagcatgtatccggtgccaaaactggtcagcaaccccatggcaaagcagttgaaggagaccatgatattgttcagcgtgatactcagaaacatggggaactcggaggaaccgttatatacagccataggttcaccattagcgatattgttcaaagtcatatccacataggagtttcctaaaatcaaacgcacaaaatcggggtctccggcagcggataccactcctatcaatgcgctgaccacaaatataatgaaggaagccaccagctcacggcgtgcatcgtgcatggccgaaggcacttcacgggtccagtaggtgataattcttgaccatttctcgcgcttgtttctataaatgcggttgtgcaatgccgaggcaagattgttcagatagatagtgatgcgggaagcggggaaatgcgtttgggcaaaagccagatctgccgtaagctccgtatatgcgtcggcaagttcatcgggagacagactttccgcctgctccaccattgtttctgctcgtttccatttttcgatgttctgccggataaacgtcacttctttcataccccatgactatttcagagaagttttgtctgaaataggtaacaaaaataagagaataatgatatatttgcaatgaaatactaaaaatgttttatcaggaatggcagaatctacaattatcaccggacaatttgtccgcatcagtcaaacgcctgccagtatcggtgagcggctcattgcactggccatagattatattctgctcggattctatgtattttctactttggccttgttttcacggattcatctaccctctgatttcacgatgcttttcttttttaccattgtctacctgccagtcttgctttatgcatttctctgcgaaatgttcaaccagggacaaagtttcggcaagcggctgatgaacattcgtgtcgtaaaggcagacggctccacgcccggcataggctcgtacctgctccgatggcttctcttccctatcgacggaccggtgaccggtggtctgggacttctggtcgtccttttgaccaaaaacagccagcgaatgggagaccttgccgccggcaccatggtaatcaaggaaaagaattaccgcaagatacacgtcagcctcgatgagttcgactacctgaccaaagactaccgacctacctatccacaagcttccgacttgtcattggagcaaatcaacgtcattacccggaccctgcaatcgggtaaaaaagaccgtacacgccgcattgcctcccttgcgaaaaaagtgcaggaacttctctccatcactcctcatgacagtaacccggaaaactttcttcagaccattctccgggattaccagtattatgccttggaagaaatttaatacgaacttccaacaaaaccaaagaagtgttaagtcttacgcttatttaagattcaagctgcatctttttggcttttcatttgttaatcaaccagaaggtcttaactaaataacaaagaacaattatgaaacgaatcattacattaatcacactggtgttggtaagtgcatcgaccctgatgtatgcacagagtagcagcgaaacacgccaagcagagcgtaaagcccaacgcgaagcccagaaagcacgcgaaaaagcagaaaatgaaaggaactatgccattgccgtccaggcattgaaagagggcaagtttgtattggaagcagaccagctggtgttcaagagaggacggagcgcatttgtttcatcgacaacaaacttcgttctgatggacggtgaacacgcatccgtacaaatagctgccaacaatgcccttgcaggccccaacggaataggcggcatcacagtggacggcagcagaaaggaaatgaaaatcacgaccgacaaaaagggaaacgtgaattgcagcttcagcgtacaaggcatcggaatatccgcacaagtgtatatcacactgaccaacggcggcaataatgcatcggcaagaatcagcccgaacttcaattcgaataccctgacgctgaacggagtcctggttccattgtcccagtcaaacgtttacaaagggcgggctttataaaacaccccttttgtccgtacaaagtataaagaaaagaagatattcatatcgtgttcgcaggatacgaatatcgtgtagacacgatattaacagaatgcgatacaaggaattaataaactgttatacagaatattaattccttgcatcgtacataaagggagctaacagaatgtggacatttattcttttatctgttgacacgttgggcaataatataccgaaccacccatataagcctcttttatgatggtactgccacaacggagacaaggattcttccatgttttggcagaaagaatggttttgtaacctccggcgttgccataaagatctgtttgcgtatcgcgtccgccctcgaacgtcatatccaccaatgtttcttttagagcattaaaaagaacgtctttctgattatccgacagaagtagcactttctgtttgggatttatccgtgcattgaacagaatatcctgcgttacgccgttacctacaccgggaatacgctgattggttgctaatagagctttagcagagagggtcttctttgcttcggcaacgagtttctcaaattccgcttcggtgtatttatcgctcaacggcgaaatgctttcccgactcaatttatagtacttattgtcgatatagctatcaggataaacattgataaaaccatacattacaaccgtgaagacaaggaatgaatcatcattaaacgtcagcaacaactggtaattggcaggaatcttatctcccgcattgtaataacggacactgactccgtcgcctatattcatgatcacattatccgaaagattgaaattgacaaacatgccatatccttcggatgaaaggatggtttttcctacgagcagtttaccatactccgacggattgccgttatagaacgtaaacttatgcggtttggtggcattgaatacctgcgtgattgttttaccgctcaaggcgttgttcacttgtttgctcagggtgataacttcgggtaattccaacatattatcttacttttattttcgatagggatatatatttccgttaataactcgtcaatagctaatcaatatcgttcattattttaaccggaccacttcccctataataggcatcaacacgttcaaagagtctttctctttcagattcatggcattcttcaacggttcgtcccagcggtgtctagccaaagcatatttggaatgatggacagtcagaatcttttccgcattcaagtccctggccacttgtcccaaatattggggcatggtatggatatatttccaatcttcgttatactgcccattctccaatatggcaaggtcaatgccaggatattgcttgcctatttcggcaaaatgcgtatcatatccactatcaccgcccatataaatcttctgcgaaggggtttcgataaggaaagaggcccatagtgcctgattcgctttcaacgagcggcccgaaaaatgccgggcgggcaagcaatgaagcagaaatcccttatccagtacagtatcttcaaaccaatccagctcaaccagggatgatttgtcaaatccccaatactcgaaatgttcgcctacccccaaaggacagaccaccttgcctacccggtttttcagctgcatcaccgtctcataatccagatggtcccaatggtcatgtgatatcaccagatagtcaatctccggcatatcggcaggcttgtaggcatccgcccctttgaacggcttgtttacaaacgaaaccggagaagccacacaaaatacggggtctaccagtatacgctttccgtctacctggataaaataggatgaatgtccgaaccataccaatacattctcgtccttgcttatcttgctgaggtccgtctttataaccggaatctccgtttcaggacgcaaatcggtttctttcttaaataagaatccccagaaagctcccaaacgtcccttttgggaagtcatcatcaccgtactgtgcagattccggaattctccgtctttgtaatgaggcgacttctttatcctctccaaccgttctccttgaggagccctcccgaaactcggctgattgacaaaaacgaatcccgctatgaccgcaacagccacaatacccactataatgccaactatcatacgtactcttttcgtttttaatgaattcatattcaatgaagctacatttacagctgcaaatatagtcgaattgttattaaatcactatcttcgcgcccaatttacggaatcaatacaataaagaaataaaaagccaacaaagaaatgaacacacacagtctatgttgcatcggttatattacccaagataaagttgtaacccctaaaaataccatatatatgccgggaggcacctccttctacttcgcacatgccatcaagcacttgaatgctaacgattttctattggtaacagctttggctgatactgacatgggcattgtggaagacattcggaaagaaggtatttccgtcaaagccttgcacagcacacattccgtctgtttcgagaatatttatggagaaaatcaaaacgaacgtacacaacgtgtcacggcaaaagcagaccctttcaccgtggaaggtttgaaagataccgatgcacggattatccacttgggcagtctgcttgccgacgacttctctttggaggtcatcaagttcttgtccggcaagggactcctctcggtagacgtgcaaggatttctccgcaaggtggagaatgaaaaggtgctggccgtagactggccggaaaagaaagaagcattgaagtatatccatatcctgaaagccaacgaagctgaaatggaagtgctgaccggatgcagtgaaccgcacgaagctgcattgctgattgcagactggggcgtgaaggaagtgctgctgaccctgggagataaaggttcgctgatttatgcccaaggagaattccacgaaatacccgcctaccctgccctgcagattacagatgcaacgggatgcggagacacctatatggtaggatatctgtatatgcgcgacaaaggcgcgtcttatcgagaagccggatgctttgccgccgccatgtgtaccataaagctacaatcgcacgggccgttctgcggaacggaggaagcgataaataatgtgataagaggataagatgatggggtgatagcaggatatcaccccatcatcttatttacaatccgaatttcttcaaatcatcttccacgctaccgatacctgcaatatggaacatatcaaccagtaccttgacgacatttggagaaaggaaagcgggcaatgtaggtcctaagtgaatatccttcacaccgaggctcaataatgccaataatacaataactgctttctgttcgtaccacgctatgttgtagactatgggaagttcattaatgtcgttcagctggaatacttctttcagcttcatggctattaccgccagtgaatagctgtcattgcactgcccggcatccaatacacggggaatgccgttgatgtctcccaaaccaagtttattatagcggtatttggcacaacctgcggtcaggataacggtatcttgcggcaaggctttggcaaattccgtgtagtagtcacgactcttcatacgtccatcgcagcctgccattacgataaagcggtgtatggctccgctcttcacggcatctaccaccttgtctgccagttgcagtacctggttatgagcaaaaccgccgataatctctccatgctctatctccaccgggggctggcattgtttggcaatctctatgatttcagaaaagtctttcctaccttcagcatccttatcaatgtacttgcaacccggatagccggtagagttggtggtaaacatacgttctttatacacggcatttgccagaggaggaacgatgcaattggtggtaaacagaatcggtccgttgaaggaagtgaattcttcgcgctgtttccaccaggcattaccataattgcctacaaaatgggaatatttcttgaaagcggggtaatagtgggcaggcagcatttcaccatgtgtatagacgtctactcccgtgccttcagtctgtttcaataattcttccatatctttcaagtcatggccgctgatcaaaattcccggacggttcttcacaccgatattcacctttgtaatttcaggattaccgtaagtaccggtattggccgcatccaatagagccattgtctttactccgaactcaccggcttcgagaaccagcttcacccactcctctgccgatagagactcaaccgcaatggtagccagtgcgcgttgcatgaaaacatgaaccgtatcatcattgaatcccagacgcatggcatgctccagataggctgccatacctttcaagccatagacaagcaattctttcaacgagcggaggtcttcatcttgttcacgcagaacacctactgtcttcgctttttcggcatagtcatcacgcgttccctgccaagtcagttcatctactttgggtaggaacactttgttgtgttccgcttcttgaatcaatccattacgcatgatgattcctttatccacccgcttcaagatgctttcatcgtcgaaatttgcattcgtaatggtgcagaacagagcatccgtcacaaaaacattcacttcttcagagaccggacaatctgccttacgtaatgtatcggcaacaacagagatgcccctgactacaaacagtaacaagtccattgcttgagccgtatggctttcttttccacacacacctttcaatatacagccagttcctttggcagtctcctgacattgataacaaaacatgtttgattccatattcctattcatttaaaagtttacattatctttccataaaagaagcggcaccttagcaataaaaataagcaagcttatttttattactttcggtttgcattatctttgtgcaaagatgagagttctacaacgcgaaaactgtcacgaatgttacatcgaatcacaaaaaagtaaaaaagagaatggaaatccatacattattgaaaatgcctccttttcaaggcataacagaagaagaattattatccctcatcctggcacccgaacatgcacgcaggcaatgcaaacctgctgactttattgccatgcagggagaagcataccgttctctattcatattgtgctgcggcagtgtgcgtacccaaatggtcagtgcagagggaaagcaactcaccatagaaacgctgaaagccccgcaactacttgccccggcttttgtctttgcctccgaaaaccgcttcccggtaaatatcgaagcaaaagagaaatgtgagatactcatcataaacaagaatgtcttcctggaattcctgcatcgacaccccactgtgatgcgcaactttctgcaactggtatcggacagaactctgtttctctccaaaaagctgaatgcctttgccctgcaaagcctaaaatcgcgcatactgaactatctacgcatgcatggcacgatactcaaccagcaggaagtggcacaaatactgggagtggctcgtccctcgctggcacgtgccttatcggagctggcaagcgaaggatgcatccggatagaaaagaaggaaatgcggataaatgaaatctctgcccaaaagtatttataaaaaatgcccgcacttatatattattccttaattccgcaacactattacaaatataactttttaagtacctgagcaacaaaaagttgctcaggaatttgccatgtcagatttttcacctatcttagtgttgcaaatcaaaatatgtatcaaacccgacagacatggcaaaggtagcaattaaatccgagaaactcactccttttggaggaatattttcaataatggagcaatttgactccagactctcatctgtaatcgactcaaccctcggtatgagatgcaggctgtatggttatcaatacagcgaaatcatccgttcgcttatgagcgtttatttttgtggcggctcatgcatcgaggatgtcaccactcatctgatgtaccacctttcgcttcatccgacacttcgcacatgcagtgccgacacgattcttagagccataaaggaactgacccaggataacatttcctacacatccgacactggcaagacctacgacttcaacacggcagacaagctgaatacactgctcctcaattgcctattgtccacagggcagctgaaagagggcgaggggtatgacgttgacttcgaccaccagttcatagaggctgagaagtttgatgcgaagcctacatacaagaagttccttggttatcgccctggcgtggcggttattggcaacttgattgtcggcattgagaacagcgacggcaacacaaatgtccgtttccaccagaaggacacgctgaagaggttctttgaaaggtttgaacaaaacaagcttattatcaaccgtttcagagctgattgcggctcgtgttctgaagagatagtggaagagattgctaaacactgcaagaccttctatatccgtgctaaccgatgcagttcgctctacaatgacatctttgccctcagaggttggaagaaagtggaattgggcggcattgagtttgagctggcctccattctcatcgagaaatggaaagggaaggcataccgtcttgtgattcaaagacagaagcggatagacggcgaactcgacctgtgggaaggagaatacacctaccgctgcatccttacaaatgactacgagtcttccgagaaagagattgtcgaattctataacctccgtggagggaaggaacgcatcttcgatgatatgaataacggattcggctggaacaggcttccaaaatcctttatgggagaaaacacggtgtttcttctgcttatggcactcatacgcaacttctataaattcatcatggcgaggcttgacgtgaagaggttcggactcaaagcaacaagccgcatcaagacgtttgtctttaagttcatctctgtgccagccaaatgggtcaggacatcaaggaagtatgtgctgaatatctattcatgcaacaatgcttatgccaatgtgttccagaatgactttggataacaccgacaacttatagtcgtgattttgcgtattgcctcaagtcgcatggtggggtaaggggcatttatatgtctttatggtgacattcgatgcactgtgccccctttttactaacgatgcagattcttttcgcttctgtatcatattaggcgcgtagttgcggatttgaggattattcttacctttgtccaagaataaaaagctatggaaaagattctactggatgaaaagtacgaacagttattgttccaaatccctctactaagggatttgccacataatatcaagcaatcgctgcttgagaaactggaatattcagtctattctatagacaagaaagatatagttgcccggcaaggcaccccctgcaagaagctatatatactattggaaggcaaattgcgtgtagatattatagacggcctgggcaataaggttatggtagaatacatcgttgccccccgggcctttgccactccccatctcttcggcagcaacaccacactgccggcaacttttaccgccattgaagactgtatcctattcactgcgaccaaagaatccaccttcaaacttatcagccaggatcccaaagtgctacacaacttcctttgcataacgggaaattgcaatgcctgcacggtttcgcgattaaaagccctttcccgcaaaacagtccgcgaaaggtttgtcgtctatctgtttgaaaacagaatttccaactctaccagcatcaccatagcgcatacccaatctgagctggcagaatacctcaatgtaacccgcccggcactttcaaaggaaatcaataagatgaccaaagaaggtattatcctaatgacgggtaagaaaattgaggtattgaatgaagcagctctgaaagagtatatctaaactaccattttacaaacaagattctcggattgatgttgacagatacccagccccaatcctgccaacgtttatggtcgccgcctttcgccacgcccatggacttcgtaccccgcatgatggagtaaccggcagaaagcttcacgcccttcatcacattccagtcaagcagatagtctatctccgaacccaatcccttttttacatcatccagcttggcagcagtagcaaaatagtgataattcaattgcatactcacctgcttggatgtcttgaagttaacacccaactgggcatcctgcaaaccgggagcgactccctgccaggcagaagcatagaaataatccatcgctccatagaacttatgatgtgttccgtaaaggggatcgaaagccttgaacttgtcaccctccccgtcacttccactcagataatcataacccaagctcacactccattgcttgtctatggcataggcagccttcacgcttgccataaaggcagatacactctgcgcattcttgttctttccggtctggtaatagaaagcagcctgcacgggcagccagtttcccgattccggttgataagtcacgtaagtaccaaacgtctgcaaatagcgggtacgggaggtctcggtctccgcatcaccggtttccagccccagattcatgaacaataaagagacatcaagattggaagcttgcgccgcataatgataccaaagggtctgcatattcttgtaaggttgcgcgccgtcataataataggtaccgccttttgacttttccttgttttggttgaaggcaagaatgaaatgcagttggtgggcattcttggcatagcccagcttcaaggcatcatgatagcgacctgcgacattccagtccagtcctcctaaaatacgttcgtcatcataagacaaggtctggcgtcccagttgtgcaaaaaaaccggcaccgaaatcgagctttgcccatgcttcgttcatgatgaaacgcccgttagtatctatctgcgggtcttgtccccacacccctacatgctgggcggaaatcttcatgctcaagtccgagcgtttgtactccatggaaaggcgtgcacggttgttgatgaatgcagctgctttgtctccctcgaaacgtgggaactgtgcaccgttacggtattctgcacggggtctgatttgcatcgacatggtgaattcgttctctttctccgcactttgcgcccacaacattccgggcaacagccataagcctaatgccaaataaactatcttcataagtattttaatttaagttatacgtatgtacactcactccttgtgccgagggcaaataattgatgccgtaccagcacatttgcaacagcagaaaagatacaagcaggccgaccaatgccttgcgatgtgccgcgggacgccccagacggaaatggatatatgccagataggaaaaccaggtagccgccgcccaagtctctttagggtcccatgcccaatagtgtccccaagcagcttttgcccagacggcaccggacagcatacccagcgtcatgaaagcaagccctacataagtcaagttatcgcacagagccatctcatgcctttcaatccccttcttcttgaaccacagcaggtagacagccatcaccgtagcggcacccagcatggcgtaggcaaacatataaacaatgacatgaggagtgaaccacgggctctgcaaggcgggcatcaaagtcttattgtgtatttcgggcttgaatatattgatgcagacaaacaccagtgacaaaatggtactgaaaccgagaatccatttatacttccaacggccgtaagtgatgattcccgccaacggaagaaaaaacgaataccacagacgggtctctcccatcgtccgcatcggaggacgttccaaagaaatccacataccgacaatgaaactgaaaaagacaaccagtcccaggcaggtaaaggtatataccactgccgggcgttttccacgccatgcagcgaaagctccccatccccagaagagtaaagcgacaatggcaaacagagcaaaataatcccaactcataccgtctcctcctttctttcttcttttccttttggtgcattgacaaacaagcagactgctcccagcaccatcattataatgccggcatatacagccgggagccaggggtcgcgcaccagttcaaagacactgacatcactccaccgtcccttcgtctcgtcatagctcaattgataaatattccacccggatatcttcaacggacgattcacctcgatagtgtcttccaccacatctcccgcctgcgtataaaccgtaacagcagacacaaaccgttgcggctcacgttcgggcatcaccagactggtctgttccgacaagcgcaatgccttataaggaaacatgaaactaccgcaactcacccatccctccttcgactgtccggaggtagcattcaccgccttcagataaacagcataggtagctcccatcgaatggaattcggtaaacttcaaggtatcttccgcagctacagaggcagccatcggaatggattgaaggatagagatgtcccaatccagcaacctcccccgttctaccttctcttccaacagcaaatgttccggcacatccttcggcagtgcctgcccggtctcattatttatcagcatcagtttgggaggatactcgtgtatagtaaattctttcagctcaacagcaagcggaagttccgtcagcttgccgccctcatctatggcacgccattcggtcttgcccaattgggtaatcattttaagacgctgcatatccgcattgcccagcgttgccgtcagaagggcaacaaacaagccggcatgattcagcagaaaaggaatcttacgcacattgaaggggatagcggcacggagaatagtcatccctaagacagcaaccagccagacataaagtaacacaaacggccaaaaagaaagcattttcgaaaagccgatgacatctgccgaaggatgggtggagggaacctgccgtaccaaccccataatgacagtgatagccgccacacagaccagggaagaaactgcagccgtataatgactgagccatccgaaacaatacacccgtttgcgaagcccatgcatccctgccagcaacagcaagaacagcaccagaacaatgatattgaccggccatgcaaacaagccccaacgaatgcctccaacgctccactgtaacagcaagcccgtgacaaacagtcctgccccacagataaaaccttccttatccccccacggtttcttccacatcttctgatttatgatttgacgatgtacaaatttattttagtgctaaccggttgttagctttcgctttttccagccaagccggtgctgtagtcttcaggaaattgtcctttgcagctctttcggcatccatatcgagcccgatatattcctgcgccttgtctttggtggagatatccggcataggaacattgtctgtatatccatgcttcgccagcaccttggagatagccaaacgcgcctgcatggctctatccaacccatgagacaagacacgctggatttcttgcggtgcgtggaaagagccgccgtgagatgccacaccaaagtcccaacgccattgtgcctgacgaatcagcgccaacacatctttcatctgctcttccgtagctcccttatcccaagcaaatttagcttcgatatgggctttggcaagttcctgctccaagcggttacggatttcattggccttgcgctggcgttcgtagacgttgttgcgcaaagtttcctcactttcgcggtggcaggtttggcaggtacggtctatcatagccaacggactctgtatatggtggtcgctgaacttcacgccaccttcactcttataaggcatgtggcagtccgcacacgatacgccacgctggccgtgaatccccatctgggctatttcaaaatcggggtgctgcgctttcaggataggggtacggctcaacttgtgtatatagtcgtagaaaccagcctcatcataataggcttccatgtcttccaccgtaaaacctttgtcccaggggaaagtcaggtacttgccgtcgcccttgaagtaatactccacatggcactgcgcacataccagtgaacgcatctcctgcggagtggccttggtaatatccttgccttggcgttcaaaagcctctatcaaagccggacggctgatatgcaggttcatgttttccggttcgtggcagtcggcacaaccaatcgggtttacaatttcatcgcccaaagcgccccacttattgttatagaaagcatccacaccgatagcttccatcatgcggggcacatcggggctcttgcaagtccagcaagtagaaggctgcgggccatccgtagcagtggcaggcgcaccggtacgaagagttgccgtaatgtcctcgatggcatgcatatgtccgcgcggagtggaatagtccttggagaaggcatatcccgcccagagcactaccatctcgggacgctgttccaatacatccacagccacatttccattgaattcactctggaagtcggtcttggcagtttcagtccatgtctgatactcacgggggaaatcactcttaaagacttcgttgcgtgcctcaattccctcaatcactgttttgcggttattgaatacacttgccagctcggccctgcgctccatcaaggcagaaacacatagccccaagacaaatacaacgaccattgaaccaccgaacaacagccatccttgccacgattttaatctcttttccatatctatgaagatttattgttattattcctttatcagtttctgcaaccactccggcacgggagattccggatagggtaccaatgcagcgggtgtagacgaaagactgttcattccaccatgaggcacgtcgcggtggcaatcccagcatgcctttccgtcgccggtgagggtcatcatgtagtctattttaccagcatccacaaactcgttggtcagttgcgtatggcaacggatgcaattattcataatgacctgcgcacttgctgcctcggcttggatagcctgcggttcgcttttagtgagaaaggcacccacgtgcttcatgccgtccatgcctttgaaagcccatttctttactatattctcatgagggacatggcaatcgttacaagtggcatcccggctgtgggaactgtgcatccaggttgcataataaggagccatgatgtggcagttgacacatgccgcagggtcatctcccagataagtgtgcgcccggagaagatacataaacaagcctccgccgccgacgaggacaccgcatacaatgagtgccgttactttccatctgtaggacggaaatagtttacttatgattggtaacttcgccataaaatgaatattttcagcaaaaataggcagttacaatctaaaaaagtgtaatcatgattacatttttccatttatttttcagtatttttaataaagcattcattctccagacatacctatatgaaaacgtccacaaaacacgcacgcctgcgcatcttgtggacatcttcatccttttataaaactgcctgctttttctaagcaactttctttaattgtatgttcgctttcctactgcccttccgaatcaatctgcgaatccaaagataatagcccgtcagcggcaagctggcccctaccaaagcggcaaggaaactcaatatgcgggtggtcagccctccccaactgcctacatgaacggagaatatccagccacggatttttcctgaagcgtcggcatccttatataaggtagccccggtgatttcaccgctacggggattgaacgtatagcggtcggcagcacgctggttgcccaaccgattgaaagaaaccgtagcagagcctttgaacacggtaatctgtttataatcaggattgagttccttcagttcttcgtaaaccttctgccagcttgtaaaaggagagaaagaatttctttcacgatgctcacctcccggtctgccaccagaccggccttgagcccgttctcctccctgggcagcagtttgtgccgaagcaccatgtcctccacccccttgcgtggtttccactccgaaaactttgtagaagccggtgcggtaccaggagaaagaccatgacagtcccgtaagcgccattaccaacagaagaaccagcgtgtacataccgcctgccacatgcaggtcatagcagaaccgacgccaacccttaccggaaacaatcttcaaactgttcttcaaagccttttttgtacggggccaccagatgacaatgcccgatatcaggacaaagacaaacatcagcgtggcagtgcccacaatcattttcccccagaagatgcctccatcgggcttcatgctgtccagcaaccagcgatgcaggcggaacatggtcgtgaaaaacggcgcacgctcatacttgccctttatctcacccgtatactggtctacatagacggaagcacgacgaggtttggaaaggttcacctgccaggcacgctccggagcagacgaggctgtgacacccgtcacagaaacactatccggcagagtagcggccactttttcggccaccttgcccatgggaagcggtgccggcccgactttctccacatagtagaggtcgcggtggcagagctccatcacctccgtctcgaataccagcatggctccggaaaaacagataagggtaatcagtagcccgaaggggactgaaagccataaatgtatcttacgaaaaactttcttcataggagctttattccagtttacctacaccgttcagttgggttgcattgacaaccagacctttggtagctgttgcattggcagggtctaccttatagatggcaggatagccggaagaggtagtgactgccacatatgcgttgccattttccatgtacggggtattaccaaagccggagacatcgcttggaaggccgttcacataagtcaaagctccagtggaggcattgaagacggcaagttggttggcaaccttgtctgatgccgtaattgccttatcatacatcagcagcaggaaataattacctgaaatataccaagtccgcaagaaagaggcgccattggctttctcttcaagattatagtaataagcggcatcaaattcttctgctttggtatcgatgcgtacaactccagcaggcaatgtagtctgctgacgcgaatcactcatggtcttggcatagctcggagaaaatacatatacatagccgtcgtcggcaagccagttcatctggtagtactgtgaacggttacgtccggcagcataactgattttgtctgtagtgatgaccttatgagaattcagtgtctgatcaccaaagatagcgatatggcattcattaggatactgggtccattgcaattcgtccttctcataggcaccgctaccctgcccgccggattctgtctttattaaatcctcattaccggaaagcacccacttgtagctaccgtcttcgttcttctgcatgcaaccatactggctaagccccatgggaatggctgctgcataaaccttactgcccacttgttctataccggccagtgttacgtattcaccattttcaaggaaattttcggcaagaaatggagtatcctttgttaccgagttctttgtataagtctgtttctcgacatccagataggaaatcaaaaaagattggggagtatatccatttgcatcattcagttccgtagggccgtcgccggtagaagtcgtcattataaattggtcataatagccgtaggtagtgaaacgattgacgttatactcctggctacgtttttccagttcaccgtttgtattcataatgaacgactgggtagtgcctgcatttccctggtgatagttcaaggcatacagatatttgtttccgtagaacacccagtaagtagccccatcgttcacaaggccattgccggcagcagtaatttcaccgctttccagtgactcggctgtcagcaggacaggaacggagctacctgaaactgtagccgtggcagctatcacatagttaccctttgaaccggaaccggagccggaacccggttcgtctgtgtctgtacaagaaattaaagccattccggtcattgccattgcaaagaggccggacaaaagataattcttcttcatttgttcttcttattaattacacctattaaaaccattatatttattaatcaccaaaatgtacacgtatcttgccatagaacgcacgcccggctttctgaaggctgaagttgtcgtacaaatcctcgttcgtgaagttgcggcattcaaacgagatattatagcggccattcttcagactatagctcaatgtcaggttatgggagaactggtcgggtaccatgaaatccttgttcttgctaccgatggcctgcgaatagtaggagaagctgtgcatgtactggttgtcgtaagtcacggacagtatattccttttcttccagaggtcgcgccaatagaagtttacgtcaaaatcagcaaactgatagggcacattgggaatgcgtgccttgtaaccgagattttccacagagttgccggtactgccgatttgcatcttctcattgtcacgcacattcatctgcgtgaagttgccgcccacactcagccagcgtccgaagccatagcgtgccgatacattgtatcccttcgtcagcaccttgccgtagttggtataagtggccccttcttttcctccgctcaagtcctggatattacgctggatataatccttcgtattgcggtataccacaccgccttccacgtagacagaatgttttccaaaactccgggaataactcaggttcaagttgatgttgtcacttttctcgggacggatgccgatgtctccactctccaggtcttcgtcaccaaacatctcttcgatagtgggcaggcggtaagctttttcataagagagcttcgcctgcaagccgggtaggatgaagtaggttccggcagcaccatatccccaagagtctaccgtacggctggtgcgtacataattactaccggtatcatcctcggccataggtcctgccacatactggcggtagtatttgccgaatgccgagaagttccacttttcggaaggcatcaggcggtatgacaaaccggagatattcttgcgggtctgcttggcaatggcatccgtctgttcttccaccgccaacagtgaagtattatcacgctggaatgcactcaacacatgattgaaagtcagcatgtggactctggcaatgcggtaattcaaggtcaatgtaccgttccaattgtcattatcggcacgggaatactggcgggactgttcgccgggactgttcagcggatgtttctcaccaagccagttgtattcatagcgggcagtatccacattcgtagtggcattgcgattgtagttggctgtcaacaccatatccagccccttgattatcaagttgcgtttgctgtattccatcgaaggcattagtgaatggccgaagcggtgcttttctccgaagactgtcttctggcgtacaccggtctgtatgtccttgtacatgtgcgaataggtgaaaccgaacatcagccggtctgcccaacttttgtccacaatacccgctttggccacaatggcttcgttgtggtaagtatcattgaaacgcttcacgcgcaccttctcactttcgttgaaactgcccgtctcaaaatcctttaccggcgcatctacatgataatcgttgtccgagtagttttgaaaggcattgatttcatagctgaaaccgttcttgaaagtctgtccgaagttaacgtatgagcggtgggtattgaacgagccgtaagaataagaagcatccaggaaccagttccggcgtttcttgttggtaacaatattgatgacaccgccaatggcatccgtaccgaagcccacgggaactacacccttatatacctctatacggtcggcaaagctcaccggaatattgttcaggctgaaggagcttcccacaccttcctgcggcacaccgtcaatgaacaccttgacgtgctttccgctaaaaccgtccagcatcaactgcatgtccgaacctaccccacccgactcacggagtttcatgcccggagccttggtcaaggcatcgctcagattcttcgtggtgttctggagttcctttgtatcgactgccacagcattgaatgccgacctcttcacccggcttactccggtagaaacgatagtcacctcgtccagctgttgcgtttcgggagcgatggttatgttcagcttcatccgctcatcattgaccagtttcacctttttctccacctttgtataacctacggcagacaccaccagcgtatagtcgccggcaggcgccttgatgtgatagaggccttcctgattcgtggttcctccataactcgtccctttcagataaacagtcgcaaaatccaccgtttctttttccgtagaaatgattctacccgaaatcatccctcctctcctctgcgcatgtacagacagagaagccaacagaaggaaaaacagcagcgagaatttaagtgtatatgctttcaattttataataattataatgttgttagtaaaccggtgcaaaggtcattattaacagccagctgtgcaatcacttattgtaggtaattatatggagtggatttatcgtatatatcatattatgcaatcaccattgataggtattatcaataataaatctaaaaaaagaggagccgggaaatgaaaaacccctatttataggtattgcccaatatgcctttttgtacgacctttgctgcaaattaaaacaagacaacggacaataaattattaaagtttaagtatgaaaattgaaaagattgtagcccgtgaaatccttgattcacgcggcaatcccacagtagaagtggacgttattctggaatgtggtgttatgggacgcgcagcagtgccttccggtgcttctaccggcgagcacgaagcgctggaacttcgcgatggcgacaagcaacgctacggtggtaaaggtacactaaaagcagtagaaaacgtcaacaagataatcgcaccggcactgattggctggtcgtcactggaacagcgtaccatcgaccacaagatgcttgagttggacggcacgcctaccaaatccaagctgggtgccaacgccattctgggtgtctcactggcagtagccaaagccgccgccaattatctcgatatacctttatacagatatatcggtggagtaaatacctacgtaatgccggtcccgatgatgaatatcatcaatggaggttcacacagcgacgctcctatcgctttccaagaatttatgattcggccggtaggcgcctcttccttccgtgaaggcctgcgcatgggagccgaagtattccacgccttgaaaaaagtgttgcacgaccgcggcctcagcactgctgtaggcgacgaaggcggttttgcaccggcactggcaggaacagaagatgcgctggactccatcatgagcgccatcaaggctgccggctacgaaccgggcaaggatgtgaaaatcggtatggactgtgcctcatccgagttctttaagaacggtatctatgactactccatctttgaaggcgaaaatggtaaaaaacgtactgccgacgaacaaatagcttacttggaagatttgattaataactacccgattgactccatcgaggatggcatgagcgaaaacgactgggaaggctggaagaagttgaccgaacgcatcggcaaccgttgccagctggttggcgacgacctgttcgtgactaacgtggaattccttgaaaaaggtattgccatgggctgcgccaattccatccttatcaaagtcaatcaaatcggttcactcagtgaaacgctggatgctatcgaaatggcacaccgccacggttataccacagtgacttctcaccgttccggcgaaaccgaggacgccaccattgcagacattgccgttgccaccaacagcggacaaatcaagaccggttctctgagccgctccgaccgcatggcgaagtacaaccaactattgcgcatcgaagaagaactgggtaaccttgctgtctatggctacaaaagaataaaataaccctttgtagtgaataagtcataaagagggaatagcgtctttgggaaaaggcgctatttttattaaagaatcgtctatatctttgcaaaagtcatcccctactatcctctataggaaagattctttccaagatggtagcaggttaatgtttcattgactaaagactattcgtccgacagtcgttacattatcgtccgacatatgtttaattatcgtccgatagctgttggacgataattaaacatatgtcggacgaatagtttttagtaagcaagaatataaaatatagcggcgcaacaatcatttgctcccaaagcctccctttattatttacggaggccttcaaaaacagtcctcattcacggttcatcaaacgatgctctgccatctgctcgaacttcgtgccgggacgtccgtaattggcatacggataaatggagatgcctccgcgcggggtgaagatacccgtcacctcaatatacttagggttcatcaaatgaatgaggtctttcattatgatgttcacgcaatcctcgtggaaagcaccatgattgcggaagctgaacaagtagagtttcaaactcttgctctctaccatcttgacatcggggatatagcaaatacggatttctgcaaagtccggttgccccgtgatgggacagaggctggtgaattcggggcagttgaaacgcacccagtagtcattgccgggatgcttgttatcaaatgcctccaatacttcgggggcatagttctgacggtattctgtctttctccccaaaagggaaagttggtctttcaattctgtcatagccatatatttttagtgatacaagtgtgcctcatttagtagaagccaaaaacttttccaatccttctctgcgcaacgtgcatgccgggcagtgtccacaaccatctcccgggataccgttataacaagtcagcgtttcgtgacgtataagttcgagcactccaagctcgtctgccagcgcccaggtctccgctttgtcaatccacatcagtggtgtgtgcagtacgaattgctcgtccatagccaggttcagcgtcacgttaagcgacttgatgaaagcatcccggcaatcgggataaccgctgaaatcggtctgcgacacccccgtcacaatatgattaatcccccgctcgcgggcgtaaacggcggctatactcaggaaaaacagattgcgtcccggcacaaaagtattcggaaagctgtctgccggcttctcctggtccatctccatgccggcatctgtcaatgagttatgtcccagccggccgataaaggaaacatccattacttcgaactccacacctgccttacgggcaatggccctcgccaagtccacttccttctgatgtttctgtccatacagaaaactcagcgcatacactttcttaaattcacgttttgcccaaaagaggcaagtggtcgagtcctgcccgccactgaataccaccaaagcagtgtccctattcatcttgttaaaagcctctctgtttccctcccccgtagggagggaaacagagagggcattgctaattatttgtttgacataataactgatttcccctcactacgggtaaggggctttaaatatcgcctattttccatactttataggagatgccttcatcatagacatcactaccgtctatccgcttaatagcttttaccacacggatagtcacaggcagtatcaatacctcgtacatggacttcagcagaatctggatacacatcatcaccagcaactcccgccatgcaatgattcctccgaacgccaccggaaagaaaatcaacgagtctgccgtctcaccaaccaccgtcgaccaaatggcacgtgcggagaaattacgcccgttgcttgccagtttcatgcggctcattacgtaggcattcagaaaagagcccaccaagaatgccgtcagactggctatgacaatacggggcgccattccaaaaacgaaattgaaatgcgcggcaccatcccagaaaggggcggcaggcaacgccacggctatcagtcccagcattaccacaaaaaagttcatggcaaaaccgctccagataatcaggcgggctttacgaaagccccaaacctcggctatgcaatcgttgataatataagaaatcgggaagaccagcaatccggctgttacggtaataccaaaaacctggataactttagtctcaagaagattggctgcaatcaagcatacattgaacagaatgcccagcaacataaaaggtacagatactttttgtttcatactcctgttttttacgtggtgttctagaatacacgaccgctattcacggcatcatacattttaaatccggttgcaaaggtacaacaagttttgcaaatgaacaaacaacatatattttaactaaatcccaagcaagacaaagctccttttttttattcgaagtaattacagacagtgcatatttagttaacgagacttaaataacatttccaaaaccaagaatattatttacaatagttttaaaaaacataaaccaatagcataaaaatcaatatattaactgattttagcacaaaatcaaaaacatgcaaccaagtttgctctcaaacaagatttcattcacgcaaatttcttaagcaaataaaataatggacaacatattttaatacatacgattctatattttaaataatgaaaattaggattatatttgataacaacaatccggaagctctggaaagcacattgatattaaccaagaatataccatattatatatagtaaccttagaaaaacaatgaatgcctatgatttacccgaaagccccaagacactattagtgtcatcttctattcaacctatttattttgagatccattagcttaaacaaaaaacatctattatgaatgaaaatcgtaaacgaggaacatcgaacaacaaaatcctcacagcaattgccatcgcctccctatttataggaagcagcaaaatcatggcaatagagacctactcggaaaattcattcggagtgacagaacagatgcaggcacaaacagcccgcggtattgttgtcgaccagaatggagagcctatcatcggagcaagtatcttggaaaaaggtactaccaatggagttaccaccgacttatacggtaaattctcgctaaacgtaaaaagaggtgccaccctggtcatttcctacatcggttataagacgcaggaagccaaagcagatgccaacatgaaaatcacccttacagaagattccgaactactggatgaagtagttgttgtcggttacggtgtacagaaaaagaaacttgtcaccggcgccactgtacaagtgaaaggagaagacatagccaagctgaacactgtggatgccctgggcgctttgcagagccagtcaccgggtgtcaacatcacgcaaaacaacggcttcctgggttcgggctttaaggtgaatatccgcggtatcggtactaccggaaccttctccccgctttatgtggtagatggagttgccaacggtagcatcgacgggctgaacccgagtgacattgaatctttggacgtcttgaaggatgccgcttccgccgccatctatggtgcgcgtgctgccaacggcgttatcctgattaccaccaaacgaggtaaaaccggcgttgccgaagtcagttacgatggctatgtcggtgtgcagaacctctacaaaatccctactatcctcaatgcccaagagtacatgatgatgcaggatgaaggccgtgtaatggacggattgagtccgtacaactgggcgacctatattccggaaagggatttgcaggccatacagaacggaacatggaaagggacaaactggctgaaggaagtgctgaatgaagatgcgttggtacagaaccacgcagtcaacatcaccggaggaacagaccgttccagatatgccataggtatttcatacaccaaccaagaagctaccatgggagttcccggcgaatttccagaaatgaaccgctacaacttccgcgtcaactcggaccacgtagtcatgaaaaaaggcaatcttgacttcctgaaagtgggcgaaaccatcaactacaaatattcgcaaacgcaaggttcattcggaaccggcggcatttattggaacggagtgcacaatatgctcatcatgagcccgttgatgcacccttacaattcagacgggggctactacctctatgcagaccaggaaaaggataactacaaatgggatatctccaacggagccaataaaaacccgatagcttatctggactactatatgaaccagaacctaagcaagtcccattacatgcagagcagcttctatgcagaactgcaacccatcaagaacctgcgtatcaagagccagttcggttacatcatgggagcctccagttatcgttcctatttgccgagattcgattatctgagtgcgtcactcaacaacgcagaagacaaggttacccaatccatgtctatgtataaccgttggtcatgggacaatacagccaactacatcttcaatatcgatgaccacaacatcgacgtcctggtaggtcagagtattgaaaaatggggtatgggagaagaaatgagcggttcagccataggctcaaacttctatgatttcaagcacgcttatttgtccaatgttccattgaccgccaacagtgtgtcctccttgactggcaagcctaacggggaaggttccatcgcctccttcttcggacgtgtcaactacaactatcaggagaaatacatggcttctgtcatcatgcgtgcggacggttcctccacttttgcccgcggacaccgctggggatacttcccttcagtatccgcaggatgggttatcagcaacgagtccttcatgtcaggaatcaaatggctggacttcttaaagctacgcgcttcctgggggcaaaacggtaactgtaatgtatctactttccaatatctttcactgataacttccaacaacggatatggcggttatacgttcggcgactccatggacctcatcagtaccggttcatacgcctaccgactgaccaacccggaccttacctgggaaacacaggagcaattgaatttcggtatcgatgcacgcttcttgaacaaccgcctgggctttgaattcgactggtataacaaaaataccagagactggctggttacggctccggtactctcttccttcggtgccaatgcagtgtccgtcaatggcggtaatgtaaaaaacacgggtattgaagtaggactccactggaacgacaacatcggaaaggatttccaatatggagccaacctgacccttgctcacaacaagaatgaagtgaccaagattgccaacaaagacggaatcatccacggtagcggcagcgttctgtgggaaggagccgaagagtgcttccgtgctgaagtaggcaaacccatcggctacttctacggctacaagagtaacggcatattccagaaccaggaacagatagacaactacaaaggtccgaaactgaacggcgacaagacacagccgggtgacgtaatctgggcagacaccgacaatagcggtacgctcgatgccaatgaccgtactatgataggtaacccgaatcccgacctgacaatgggactttccctgaatgtcagctggaaggccattgacttctcaatcactacttacggcgcattcggccagcagattctgaagtgttatcgtgacttctcctcctcacccttgaataactatacagcagagatattccaacgctggcacggcgaaggtacgtccaacaagttcccgagactgtccagcgcttccagctccaactggaacagagtatcagacatttatatcgaagatggagactatcttaagataaagaacatcactgtgggattcgacttcaagaaagcattcaagaagttaccggtacaacagctgcgcctgtatctgaccgcacagaacctctttaccttcaccggctattccggtatggatccggaaatcggttacggtggcgacgattatggttgggcatcaggcatcgacctgggctactaccccagtgcacgtacctatatgataggcttaaatgtaaaattctaattaaccgaagaaattatgaaaaagatattattcatagcatcagcaatactgattcttctttcaggatgcgaaaacttcctcgattcggaacttttgaccgaaaagacaaccgccaacttcccggagacagaaaaggatgcccaagagatggtgacggccatatacgcccatctgttgtttgaaagtcctgaaacctcttcccagtattacattgcccagttggcaggtgacgactgtctgggaggcaacctctcctactccaacaactgtgccaccaacttccttatgtacagtggcaatctgaatacatttgccggcatctgggaccgttgctacacccttatcaaccgtgccaacaatgccatcaacacaatggagaatgtgaaatcatggtccagcgagagcgaacgtaaccgacttttcggtgagtcctacttcctgcgtgccatggcttattatgagctggcacaagtctttggcggagttcctttacgcaccacactggaaagtaccaacctgccgcgtgcatccgtagacgaaatctacacccagattgcagccgacttgaaaaacgctatcgaaatgatgccggcaaagatttatccgaaaggctcagacatgaccggacacgctacaaaatatgctgccgaagccatgatggcacgtgtattccttttctataccggacgctacgaaaaaaacgaactccccaacggaactaccaaagaggaggtcatctcttggatagatgactgtgtaaacaactccggtcataaactggtgtccgaccaacgcaacatctgggcctacaccaacgatgctaccgaagacaataccgaagggttccgttaccaatacgttatcaaccataacctgaaatgggaaggaaacagttccgacgaaactttattcgccaacaaacataacctgaaatccgactggacctatacctggttctccaacacatgcgcgcaattctattcaccgtctgccgacaactattccaacaaagacagttatcccttcggcaccggttggggagctggccccgtatctccggctatggtcaacgaatggaaagactgggccgccaagcagacctatacggacggttataaggaggatccccgtctgaccggttccatatggtcgtacaaagcacttgatccgaatgttgccggcaatgtgctgatggactgcaccatggacgagggtgaaccggaatataccgtatcctatcgttactatgaacaaaccggctatttccagaaaaaatacatcaatatcaattcctacaatgaaggcaaaatcgaacctttcggcaagcagatgttccccggaatatcttcgcagacatcccaacagctactccaaattgccgacttgattcatatccgttttgccgacgtcctgctcatgcagtccgagctgaaacaagacgctacgggtctgaacaaggtacgtgcccgctcccacttggctccggtggcctactccctggaagccatcaagcaggaacgccgctgggaacttgcattcgagtccatccgctggtgggatatccttcgctggtcgggtccttcgcttgaggaagccggtgacatactcaacaaacagaccgggttcaatataataaatgccgctacggtggtaccgatggtaaaattcgactataagaaacgcctacaagcaacccaaggctactggcccattccgcaagacgaaatcgacatctccaatggagtccttgagcagaatccaggctgggatgcatctgcccagttctcggattggaacaatatgtaagagtattaacctataaataaagacaatatgaaagtaacaaaaatattgatagcaatgcttgcttcagccttcatcgttactgcatgcgatcctatcgaagacgaagacttgcgagacaaatatgtgactgatgccggtacacccataaccaaagaggcattacaagccgccatatccattacccaacccttccccaaccaagacggagtagtggaaggcgaccagtatatagccctgaaaaactcccgcccggacattggcggttcatggcacatagaatgggggggcgaaggaagtaaacaaagtaagactctggtcacggacaacgctacggtcatcatggagtccaatgcggactattccatctactatatgggcatttccgccaatcagattatcaagacagagccggttgtagtgactgtgaccaatgtattcgacgattggtccacttacttcaccggtgcaaccgacaagagtgacaaatctgccaagaagacctggaaattccgtgaagtcagctggggttccgtctgcaatatgggggctcatggaggctggaaatataccagtgcaggctatactcccgaatcaaattttgcctggtgggccaatgtcactgccgccgaagcgggagaccagtccatggtattcgaattcgacggaaacaagatgaaaacctatgatgccagcggaaacctgaaggcagaaggtactttctccttcacacacgaaaaaccggaagacggagtactgggtgaactgataacaagtatccccaccatcggaggaaattatgacgacaacggacaaagcgtaggcagcaacaaattctggctgctgacactggatgagaactatatcacaatctatcatcccggcaagtatagcggtggtgtggattgggacgacagcggctggtatgcttatttcaagactgaagcagaaaccgattctgaataatatgcactctctatgaaaaggaaactgctatttataatagctactgtctttctagtagccgcatgtcacaatgacgactacatgcccggactgccagctccgggaaatgaagacaacgagaccgaaatggccgagcaggttgcaggccgggttgcattgggctacgtcacttattatggcacatccatacccgatgccaaatacctgacccacataaactacgcttttgcagaattatatgttaaaaacggaatttatgaaaagtttggcctgcaaggtgataaatcccgttttgataaggtaaagaaaataaagagccagtatccacatgtgaagatattactctcttttaccaatagcgtttccaatactgacaattcccaggacggaggtttctccgccctggcgaagagtccggaaatgcgcaagcaattcgcacaagactgcaaagcctttgtttcgagtgagggcatagacggtattgacattgactgggaatttcccggtatgaccttcggcagcaatgcctatgacgagttggtagatgtggaaaacttcaccctattgatgaaagacctgcgtgcagcgttggggcagtccaccctattgacctatgcaggttattgcatggacaagcgtccccaaggcgaaggctataaatatattgatgtaaaggccgtagacccgtatgtagatttcgtcaatatcatggcctatgatctggttgatgccccccagcatcaatcagcattgaacaagccaagtaattactgggactgccagcgttccgtagacgaatacctgaatgcaggggtatctgccgacaaattagtgttgggaattccgttctacggaagagccgatttcaatgccggcggcagcatcaattatcgggatattctcaacctgagtaaggatgacggctatgtcatcgaaaattgggatacagaaggcaatgtcccctatgtcaccaaaaacggcagtttctactgtggttacgacaatccccgcagtattgccgcaaaaggtgaatggatattaaaaaatggcatgaaaggcatgatgttctgggattatgaaggcgatgacaccatgggaaccctacgcaaagcgctgtggaatgccgtcatgaaaaaataagtaacttaacacacattctcaggaggttattccggaaattagggtaagggtaattttgcatacgatcttcattcaaggcaagaatactgacggaataacctcctttcctcctccaagactacaaaaccttttttcatttaagttgttgaaagcacattcatcaaaacctaacttaaatgaaaacaatcttaaaagcaatgtttctgttgtgcgtagccggacttcccttgtccactatccatgcacaaaaaaaagagatcatcgatgacgaagcccccaacggcattgtcatagttaccatcgacaaagcgggcgacgagattatccgcatcatgaatgagtcacaattgccttacatccatgacccgaaagctccccgcttcctattgatggacaaacaaggcaaattcgccctgggtatcggagggtatgtccgtgccaccggcgagtatgattttgaaggtattgtggatgatattgactttgttcctgccaacattccaagcagtagtaaaatcaaaaatcaatttcaaatggatgccagtacggccactatctttctgaaattagtcggacacacccggctattgggtgacttcacagtctatacagccggaaatttccgaggaggagacaaaacattccagctacggaatgcttatatgtcattccgaaatataacggtgggatatacttacggcggtttcatggacttaggcgccctcccctccaccattgacttccaggggcccaacggtgccacgttctaccgcgctacacaattgtcatatacttataaagggctgaaagactttcgtttccaagcttccatcgaggcgcctgccgttgacggcacaacaagcagccaattcgaaattgcccagcaacgcatgccggacttcacagcttcggcacaatacagttggaacagcagcagtcatctgcgtgtaggaggtatcatccgcagcatgacatataccagcacggaaagggacaaggcttccagcgtcaccggatacggtgtacaagcctcaacgacctttaacctcggtaaaaaatggcaggcattcggacaaatcaactatggtaaaggtatcgggcaatacctgaatgacatcagtaatctgaacgtcgatattgtccccaatcccgaaaaggaaggcaaaatgcaggcattgcccatgctgggctggtatgcaggtctacaatataacatttctccaaaggtattcctttcaagcacttacagcatgtcccgcctttactctgaagacggttatcccaacgacctgccaagtacctaccgctacggacagtatttcgtagccaacgtattctggaacgtaaccccgaacatgcaggtaggcgctgaatatctgcgtggctggcgcaccaacttcgacaattccaccaaccatgccaaccgtatgaacctgcttgtacagtattctttctaatccaatataaaataagaaagaagccgcctcaaatcgatatttgagacggcttcttaatatataaaggtaggattgtgaaatcagaacttatagtcaacaccaagaccaaacactttattagtacggctataaacattcttggtggtttcacttatcttctttgtataatcatcatagtttgtccaaaaataggctatattcatagtcaaatgctttgtcattttgatggcagcaccaaaccccagtgaataagagtcacatgaaaaacttatatcactctgaaaatcatcagccaagccataatctgtacgctgataaccaccactgatggtcagctgtttagctatatcccattctgcaccaatcaaaatttcatgtgtgccatgcttcaacgctttctgcttatcattggccatccctgccgctttatcaaaaaaatggtgatattccagcgttgcacgaagcgtaggaaggaattcataaccaacagctgcagtcaataatgcagggatatcactcggagtattcacaccatccttatagtcagccaaaggattcccttcatctcccatagcagttcccattgcacgcacttcagcttttttggttttattttcgagattaagacttgtcataaactcgtacttcaacccaatattccatttgcccaacttcacatcagctcccaagataggggtcaatccccagccggtctggtcgcagtctaaatcgataccaaccaattccatgccaccataagtaggaatattactgtgtgctgttgcagtcagaaatccttcatacccaccggtaaaataattcatacgtccaccggcaaacacacctaaccaatcattaacttgatacgacaaccccaattgcacaccataaataaactggcttccatccattgcactattgatagaatacatattgggagtgatttgaccacccgaaatagtatggatttgtcccatcaccattgaatcgaacatacccaaaccatcatcaaacgatgccttaccgccaccacctacaacagcaaagctaccggaaatagtccagtctccttttttatatgcaccttgaaaactaggaatgaaaggagcagaagcttttcctttataataacgtgtattcccatcttcaataaacaagggaaatgtcgcttttatgttacgggtctgataagcactttgtccattcaaagacaaatagagaccatcttccggcaagaaggccaaaccggccggattagaatagacaccgtcaatatcaatagaagcaccacgcgctaacattctaagaaaagatacatgctgatttgtatttgttaggataccacccgcaaaagttggaattgaaacgattaacatcgcaatgctaatcaacgaaatttttctcatctaaatcttttttaattgttttcgggcgcaaaggtacaataatattgcacataaaaaaatagttttgtgcataaagttatcctaatataatactttcattgaaataccaaatagtttctgatgaaacaaatggaaataattatcattttatgaatccttccggccactgaaccatatcaactttccacttgttatctccctattattatataacatttaaaaaacaacaaatcccatggcatacactattgcattttttggcagcaaaccttatgatgaagcgtctttcaatgaaaagaacaaggaatatagttttgagctccgctactataaagggcatctcaacaagcacaacgttattttaacccaaggagtagacgcagtctgtattttcgtgaacgacacggccgataccgaagttatccgtctgatggcagacaacggcgtgaaattattggcgttgcgctgcgccggctacaacaatgtagatttaaaggcagctgccgaccgtggcattaccgtagtgcgtgtccctgcttactccccttatgccgtagcagaatataccgttgccctgatgttatccctcaaccgtaaaattccacgtgctacctggcggacacgagacggaaacttctcgctgcacggacttctgggcttcgacatgtacggaaaaactgcaggcatcatcggcacgggaaaaatagccaagaaactgatatgtatcctgcgtggattcggcatgaatattcttgcctacgacctctatcccgactataatttcgcccgtgaacatcaagtggtatataccagcctggatgagctatatcacaattcggatatcatctccctgcactgcccgctgactgaacagaccaaatatctcatcaacgactattccatcagtaaaatgaaggacggagtaatgattatcaataccggacgtggacaactcatccataccaacgccctgattgaaggactaaaaaacaagaaaatcggctctgccggcctggatgtgtacgaagaggaaagcgaatacttctatgaagaccaatcggacaaaatcattgatgacgataccctggcgcggctactgtccttcaataatgtcatcgtcacttcgcaccaggcctttttcacacgcgaggcactggcaaacattgcttcgacaacgttacagaacatcaaagattttatgaaccataagccactggaaaatgaggtcaaagcatagttcccactcatttacaaattattagacatcggttttaaaactttataactttccaaagcgttactagtatataaaccattttaagaaaaggaataaattatgaaaaaagttatagacaaatcagacagcagaggtcattccctatatgattggcttgacagccaccacaccttcagtttcgacgagtattacaatccccgccggatgaatttcggcgccttgcgtgtactgaacgacgaccgtgtggctccgggaaagggcttcggcacacatcctcataaaaatatggaaatcatctccattcccctgaaagggaaactgaaacatggggacagtcatcagaacagccgcgtcatcactccgggagatatacaaaccatgagtgccggcaccggcatctaccacagcgaaatgaacggcagtgacactgaagcggtagaattcctgcaaatctgggtgatgcccgaaaagctgaacacaccacccgcataccaggacttcgacgtacgtccacttctgcgcaaaaatgaaatggcactaatagtatcccctgacggcgatgctcctgccagattgctacaacagacctggttctctatcggtgaaatagaagccagaaagaagattgactaccacatgcaccaatcgcattccggtgtctacatcttcgtaatggagggtgaagtcaaagtggacggcacaatactctcacgccgtgacggaatgggagtatacgaaaccggcagttttgagctggaaacattgaaagactctcacattctcttcatagaagtaccgatgtagcgtgcttttgcataaaataacagcttaaaccggaagtttgtgtagcgttttttgtaatattgcgctataattcaatccgtaaatgaaacttgattacatctaccatagcggcttcgcgattgaagcggacggagtgacggtcattatcgattactataaagattcctcggaagaggttttcaataaaggtatcgtgcacgactatctcttggaaaagccgggcgtactctacgtactatgctcgcatttccatcccgaccacttcaatcgcgaagttctttcatggaaaaaactgcggcccgacatccgctacatattctccaaagacatcctgaagcaccgccgcgcctcagcggaagatgccacctacatcaataagggcgacacctacgaagacgaacatatccgtatccaggccttcggttctaccgatgtgggtatctccttcctgatagacctgcagggcaggcgactgttccatgccggtgacctaaacaactggcactggagcgaggaatctactccgcaggaaatacgcaaggccgaaggtgactttctggccgaagtgagagagctgcagcaaactgcacctgccgtagatgtagtcatgtttccggtggacagccgtatcggaaaagattatatgcgtggagcagaacaattcgtggaacgaataaaaatcactatatttgtaccgatgcacttcagcgaagattatcagggaggcaacgccttccggcagtttgccgagagcaagggatgccgctttctgagcattgcacaccgtggtgaaagtttcgaactccccaacttgtagcccataattcgtaaattaataattaaaacacatactattatgaaaaatttgacacaacttctttttacactgttttgcctttgtctgccggccatgctgcaggcgcaggataaggacgacagtaaatatctggccggtgctgttcccgaggtggacggcaaagtggtattcaccaaagagttcagcatccccggcatgtctcaggatgaaatctacgaacgtctgctcggctggatggatgcccgtctgaaagagaatgaaaataccagccgtgtagtattctcagacaaagagaaaggacaaattgtaggtatcggggatgaatggattgtattcagttctacggctctgtcattagaccgtaccaaaatcctttaccagctgactgtgacctgccaacccgaaaagagcgtgctcgaagtagaaaagatacggtttaactaccgcgaaggaaaagaaaaatataccgccgaggagtggattgtagacaagtatgccttgaacaaggcgaagaccaaactggtacgcggacttgccaagtggcgcagaaaaaccgtagacttcgttgatgacctttgcctgggagcagcagaagcattgagcgccaccactgccaaagctccggtagaagaaaagaaggaagaaaagaaagaggtgaaggctgtcgtcaattccggtccgacggtaatcaccccgaagaaacaagttaccgtggaacctgcccaggctgctgaaaaggcatccgaaggcatcgtgaaagatgcccaagtcatcgaagtgccccaagtcaagaaacctgccgcactggttcctgcccaaaagagccagcagcaagaatacaaaaccatagcccccgagcaattgtcagccgatgccatccagaccggagcaggcaaattggttatcgtcatcggccaagagcctttcaacatgaccatgatgacagcaaactccggaggttctttgggcaaagtcaacggcaaaccagttgtattcagcatactgtcgcccgaccagccgtatgaacaaatggaaaaagcagaaagctataccatccgtttctatcctacgggacagacagagcctacggtcattctggaatgtaagaagctgccttcaccggcaacgatggaaggtatgccacgcacgtatgtaggcgaaattctgaaagcaatggtcaaatgaccgcacacgcagactgcaaattgtaaataatcaaatcaggaataaacaaatggaaataaaaagtaaattcgaccattttaatatcaatgtcaccaacctggaacgtagcatcgcattctacgaaaaggcactggggctgaaagaacatcataggaaagagtcgtccgacggctctttcactttggtctatctgaccgacggcagtaccggctttctgctggaactgacctgcttgaaggagcacccacaagcctacgaattaggagagaacgagagtcacctctgcttccgcgtatccggcaattacgacgccatacgccaataccataaggaaaacggatgggtatgtttcgaaaacacagcaatgggactgtactttatcaatgacccggatgactattggattgaggtactgccggagaaatgatattttacatcactaaaacaacgaaatatatgagtatagaagaagcgatgatgggtggtattgtcttcaaaggcaaaaaggacaaacctaaagaagaaaacaagataaagaccaaagccaagaagaaaacctacattaccgggcaacacggttccgcctcagccaaaatgaaagcagaaatccgccgcaaacgcgctaacagacataagaaatgataaatacagccttattgcctgccgacaaggacccgatgggcgcagccatagccgattactttaaacggcataaagccgaccgcctacgcgtgttctcttcacaattcgatgaggacgaaattcccgtcgaagagctattccgcacagaaaagcaaatgcccttgctggagcgtactgctctgcaaatggcgaccggaaagattctggatgtgggtgccggtagcggttgccatagccttgccctgcaagaagccggaaaagaggtccatgccatcgacatttccccgctttccgtggaggtgatgaagcagcgaggtgtgcgtagcgtgtcacaaaccaatctgttcaatgaacagtttgccgatgaatacgacactatcctgatgctgatgaacggttccggcattatcggaaagttggagaatctgcctgattttttccggaagatgaagctgctgctccggcctggaggctgcgttttaatggattccagcaacctgagctatctgttcgaagaggaagatggcagtattgttatcgaccttgccggtgattactacggagaggtagacttccagatgcaatacaagaatgtcaaaggagactcctttgactggctctacatcgacttccaaaccctgagcctttatgctgccgaaaacggctttactgcaaaactggtgaaagagggtacacattatgactatcttgccaaactatcccgacaagcataaaatgaagtgccccctaaaagttagacaaaaacttttagggggcacttcttttttttatatcttgcctatgcctgctattcagaaagcatcccgtcaatctccttcaccagagaagcaaattcttcagggttatacaaacgtgtcagcttcacaatacgcccttccttatcaattaggacattgcgtgtgatgcctgccttgcggagcgcatacttcgcaaatatatccgctcccgggtccagccccaaaggataggtcactccggttgacttaccaaaagcaatcactttctccaacggctcgtcacggtcgatgccaatcagcataaaatccggattcgacttatgcttcagccatatatccttctcaatgaaaggcatctccttacggcataccccacaccagctcgcggtaaactgcaacatgaccaccttcccacgaagtcccgaaagggtaatgcttttcccatccgtcagcttcactgtaaaatctggagccatctcccctaccttaacgatgtagccgatactgtccgccactacatcctgcgccttgcctgccatgctgcacatagcaaacagacagaaaatcagaaatccaacttttttcattttattcaatctttaataagtaagctgtaactattcagcgaatgatattttatagaatgggcaaacaattccctataacaaaaaactccgaaacacttttaaaaagcagtttcggagttttattcttcgaggtacctggcagattcgaactgccgtacacggttttgcagaccgctgactaagccactcatccaaggtaccggttcttacaagaactctttatttctcgtttgcggatgcaaaggtagcactttttttgaaactaccaactatccgcaacaacttttcttcttttttttcgtcactccactgcactccgcacgcttcttatcatacaaattctttagttcacagccacttgcacaactatcacacggattaccattttctttgacccgatgagaaaaagaataaatactcatgccaatccgcacagcgcagagcaacaacaataaggctactacccactcctgccaactattcatcataaaaacagacctcctatctgataaattgcgaaagacatcagccaggccagcgcagtagtataaagccccgcaaacacggcccacttccaactgcccgactcccctttaatggctgccaacgtggcgatgcacggaaaataaatcagcacaaacaccatgtaaccgaaagccaccaggggcgttatcggaatgcgttcacccaagcttacggcatctgcctcggcatcgtcggcataaagcactccgagcgtgcttaccaccagctccttggcgcccacgccggaaaggatgccgatgcccagcttccagtcgaatcccaacggttcgatgaccggttccatggctttaccaatccggccgatgtaggaattctcctgctgttccgtcacactttcatattcatcgtggttgggataatatcccaatgcccagataacgatggatgccaccataatgatgcctcccatcttgcggagatactgcgcccccttctcccacgtatggcggaagatggccttggacgtcggcatacgataaggcggcagctccatgacaaacggcgtatcgtctcctttcaccagaaagcggcagaaaagacgtgccatgaccactgccaacagaatgccgatggcatagattactaacagcacaaagctcgcattgttcgggaagaaggcgcctaccagcaataaatagatgggtagacgagcgctgcacgacatcagcggattgatgagcatcgtcaccagacggctcttgcggttctcaatggtacgcgaagccataatggcgggcacattacacccaaagcccataatcagcggaatgaaagactttccatgcagccccattttatgcataatcttatccataatgaaagcggcacgtgccatatagcccgagtcttccatcaaggaaataaagaaatagagcaacagaatattcggcaggaaaacaatgacaccgcccacacctccgataataccatccaccagaaggtccttcagcggtccttcggacatgttgttgcatatcaggtcgcccaattcgcctaccagccattcaatcccctgcataggatagtcgcccagcacaaaggtgccttcgaacatcagataaaggaaaaggaagaaaatgggataaccccatacacggtgagtaacgattgagtctatgatttgagtagtgcgcgacgtatcctgatgattgtccacataggtctcgcgcagggcaccggctataaaaccatacttggcatcggtgatggcctgctcgctctcctcgttcaccacctcggcaatccgtgcctcttcccggtcgcggacagcaagaatctcctttccattgggcaactcctccacaatctttttcaagtcttcgtcgttctccagcaacttgatggcaaggaaacgcgtggaatatttgtggcggatgttctcattgacgctgatgacgcgcttcacctcctcaatgctacgttccagctcgggaccgtgattgatatggatatgacggtagaagccacgcggctgttctatctcttctttatggctgccgaagtcatggtcgggaacatactcctgatgccagctgcgaaggtcactcaatatctcgctgcgcatcctgcccttatggtcgaggaagtcgccgccttcgtaaatattgataatcacatggaacagctgttcaatgccttttccgctacggctgaccgtaggcaacatcggaactccgaacaactggctgagctttacatagtccagcgtgtttccactggcttccagctcatcgtacatgttcagtgcaatcaccatgcgcacgttcatgtcaatcagctgggtggtgagatagagattgcgttccaggttggaagagtccacaacattgataatgatatccggcgtttcattgataatgtgccggcggacatagatttcttcaggggagtaggccgagagggaataggttccgggaaggtcgacaatacggaagtggtaaccttggaaatcaaaatacccctccttggcatctaccgtaacgccactgtaattgcccacatgctcgtgcgaaccggaagcgatgttgaaaagagaagttttaccacagttgggatttcccaccaaagccacatttatggtgcggcgtttgccgagggccagttgcttcagctcatcttcgcccagatgcatgttttcgcccaacccctcgtggtaatcgggctgcacagcctgctccttagcttcctgctcactgataatctctatcatctcagcctcctgccgacgaagagaaatctcatatcccattactttgtatttgatagggtcgcgtagtggggcattcagcaagacctccactgttttacctttaataaatcccatttccacaatccgtttgcggaaaccaccgtgtcccagcacttttacgattacacctttttcaccggtattcaattcggacaaacgcatagtctttctgcctttcttttctattttgggggcaaagataatacttatgtccgcaaggcacaaataatttagaatgtttttaaataagagacactaaacaataatgcccagaaggcaaaacactacttccagagatactaaatcgtaacttcaccacacctttgttcttttcttaccacagctgtggtaagaaaagaacaaaggtgtggtatgcataaaacacagctgtggtaagattagcttttagcaaatacgaccttagccgatagagattctgaaaatagatacttgcagatatggcaataaaaatcgtttgcactatctttgcaccactctatagttgaatatgcagaaggtagtacaatacatcgagcgccacaagctcttctcgctggacgacaagatacttgtggcactgagcggcggggcggactccgtggcgttgctgcgcctgctcctctgcctgggatacacatgcgaagccgcccattgcaacttccatctgcgcggagcggaatccgaccgcgacgagcactttgtacgccagctctgcctggagcaccgggtgacgctgcacaccgtccacttcaacacggagcaggaagcaaaggaacggcatatctccatcgaaatggctgcaagggaattgcgctacgcgtggttcgaaaaaacaagggaagcatgcagtgcagctgtcattgccgtcgcccaccatcaagatgacagtgtagagacattgctgctcaatctgattcgcggtaccggcatcaacggattgcggggtatacgcccccgaaacggacatatagtccgccccttgctctgcctggacagaaaggaaatcgtcggttatctggaaagtatcgggcaagcctacgtgacggacagcaccaatctgcaggacgaatatacccgcaacaaaatacgcttgaacctgcttcccatgatgcaggagataaacccctccgtcaaggaaagcatcctcaaaacggcagagcatctggacgatgccgcctctatatataatataggtatagaagaagccaaactgcgagtcaagacaccggaaggcataagtatcggcgccctgaggcaagaagcggcaccggaaacggtcttatttgaaattctgcatccgcttggattcaacgccgcacaagtaagggacatctgccggacattggacggacagcccggcaaagtctttgccacccccggctggcgtgtcatcaaagaccgcggctcgttgttgatagaacccgtacaggaagccgtaaagccgttattggaaatgaaagagcatccctatgcaccggatttcatgattccacgcgacaaagctaccgcctgctttgatgccgacaaactccagcatcccctatcactgcgcctttgcaggcagggagacagcttcgtgcccttcggcatgaaaggccggaagaaggtaagcgactacctgaccgaccgcaagttctcccttctgcgcaaagaacggcaatgggtgctttgctgcggagatgacatcatctggctggtgggagaacgggtggacaaccgtttcagaatagacgaaaaaacccggaaagtgttggtcgtatcaaccatcgaccagtagccatcacagaatgattctgtcctccttctgtttcttgaagcaatcggaaagcaatacggcaaacggcgtgtcatacgtgcgcgccttctgcggacagcctttcacacaagcacaacatttgatgcatttctctgcaaccgtattgcactcgtctccttttataatggctcctgcaggacaatgcttcacgcaatatccgcaatgcgtacaacgttccgcatccacttgcggagtacggggcataggcaccccactcttacgcaacttgacgactctgcgcaaaaagcggagcaacgggaagaaaggctggcgcggacgctggatacgggtcacatccaccccatacagtttctccatatcttcggccgccgcaattttagcacgtattttttcaccaaaaagctttgcatactccaagtcgtccgcatccggacgtccggatgccaccggatatttctcactgctataagagtgctctcctacaaacgtagcacctgcaattaccttgaagcccaacttcgtgacaaaagcatccaattccaccaaagccttctcataggcccggttgccgtacaccaccacaaccacggcaggtgcaccgtcagcatgaagctccttcatccgctccaatgccaaaggagccacatgaccgccatatacgggcaccgtgatgaccgccaaagcatgggaaggtacctcccttttacccgccgcctccaaggtgaggtccactttggagacagacgaaattcccgttccgtgaacaattgcctctcccacttgtttagaggtacaagtaggtgaaaaagttatcaactgtacttcatctatattcataaaccaatccttcatgttgttgttaatacagcaaagataaagttttaaatttaaaaaaaagatgatttgtttatgaaaccaaaaatatttattacctttgcaccgttgaaacattctgcgacttcttgctgtggcaagaattgtttatcagatttccggttcaataataaatatcccatataaatcatatatcacaaggtaaacttgcccaagttgcttcctacaacaactgcaactgtgcacttatgcctttcaataaaagtaaattttaaaccattcacatatatactgtatgtataacatcattcaactgaacgacaaaaatttgtcggaactacaaactattgcccaagaactgggtataaaaaaaacagactcactcaaaaaagaagaacttgtttacaagatacttgacgaacaagctatcgcaggcgctaccaagaaagttgccgccgacaagctgaaggaagagcgtaaaggggaaaagcaaaaacgctcgcgcgtcactgtaaagaccgtaaaaaaggaaggtgccgacaaagtgttctcagccaataaaaacggagacctcaccaaagccaaaacagaggaagcaccggctgcgaaagaacaacccaaaactgtggaagcaccccaagaaccgaccatagaagctgcaacgccggcgccagccaaagaagccgccgtacccaaacgcaaaccgggacgcccccgcaaggtaaaggaagagactgctgcaccccaagcaacagaaaccccgaaggttgccgaaccggaattgaacttcgaggctaaagctccgaaaacagaacctcaggcagaagccaaagcagaaaagaatatcgtaccggacgaaagccctatcctggccgaagcggcagatgacttcatccccattgaagacctccctacggaaaaaatagaattgccatccgaactcatcggcaaattcgaagcgaccaaagcagaaactcccgccactcccactcccactcctgccgctgccccagccgaaccgcaacagccacaacgcccgcgcctccgcgcccgcgacaacaacaacccatacaataacaacaacaataacaaccgcaacggtggctataaccaacagcgccccgtgcagcagcgccctgcacaaccgtataacaacggagagaactatcccgccgctccggaacgcaaacccgtaatagaacgcgagaagacgtacgaattcgatgacatcctcaccggaaccggtgtactggaaatcatgcaggatggctacggcttcctccgttcctccgattacaactatttgtcctcaccggacgatatttacgtatcacaatcacaaatcaaattgttcggcctgaaaaccggtgatgtggtagaaggcgtaatccgtcccccgaaagaaggcgaaaagtacttcccgctggtaaaagtatccaaaataaacggacgtgacccggctttcgtacgcgaccgcgtaccgttcgagcacctcacccccctcttcccggacgagaagttcaagctttgcaaaggcggatactccgactctatgtcggcccgtgtcgtagacttgtttgcccccatcggcaaaggtcagcgtgccttgattgtggcacagcccaaaaccggtaagaccatcttgatgaaagacatagccaacgccattgccgccaatcatccggaagtctacatgattatgctgctcatcgacgaacgcccggaggaagttaccgacatggcgcgtaccgtcaatgcggaagtaatcgcctctaccttcgacgaaccggcagaacgccacgtgaagattgccggcatcgtccttgaaaaagcaaaacgcatggtggaatgcggacacgatgttgtcatcttcctcgactccatcacccgcctggcacgtgcctacaacaccgtatccccggcttccggcaaagtgctttccggtggtgtggatgccaacgcattgcataagcccaaacgcttcttcggtgcagcacgtaacatcgagggcggcggttcactgaccatccttgccactgccttgattgacactggctcaaagatggacgaggttatcttcgaagaattcaagggtacgggtaatatggagttgcagctcgaccgcaacttgtccaacaagcgtatcttcccggctgtcaacatcgttgcctccagcacccgccgcgacgacctgctgcaagacaagcagacactggaccgcatgtggattctccgcaagtaccttgccgacatgaatccgatagaagccatggacttcgtaaaagaccgtctggagaagaccaaagacaacgacgaattcctgatgagcatgaacagttaacagcaactgcatacagatattgtacaaaagcttccatttacgttcataaacgtaggtggaagctttttttatatccgttttttcatacatttgccaccatacaataaccttgaacaaataaaatccaaatctgatgaaaacgattcactcttttatgggaatggcattgtgcagctttccggtaatggcacagcaatcgcccaattttcttattatccaatgcgaccatctgacccagcgggtagtaggcgcatacggtgccgaccccagctgcactccacctatagaccgaattgcctcccaaggtgtaacatttgccaacgcatacgtgggatgccccctcagccaaccgtcacgcgctgccttatggagcggactgatgccgcatcaaaccaatgtacgttccaactcggccgaacacatcaatcctccgctgcccgacagcattccgaccctgggaagcctcttcaccgccaacggttatgaggccgtccactttggcaaaacccatgacatgggttccctaaggggattccgccacaaggaaccggttgccaagcccttcaccgaccccgaatttcccgtcaacaatgacagctttctggatgtaggaacctgcgaggatgccgtggcctatctcagcaatccgccgcaagaacctttcatctgcatagccgatttccaaaacccgcacaatatctgcggatatgtaggcgaaaataaaggggagcacatagatagccccatcagtaccccactcccgctactacccgaaaactttgaagtggaagactgggaaaaacttccgttgcccattcagtacatctgctgcagccaccggaggatgatgcaagccgcccactggaacgaggacaattaccggcactacgtcgccgccttccagcattacacgcggatagtggccagacagatagagagtgtactggaagccctctactccactcccgccggcaaaaatacaattgtcattgtactggcagaccacggagacggaatggggtcacaccgcatggtaaccaagcaggtcagcttttacgaagaaatgacaaatgtgcccttcatcatagccggtcccggtattcatccccgtcaaaaaccggtggaagatttactgacccaacccactatcgacctgctgcccactctctgtgaactggcaggcattccggtgccttcctccaagcccggcatcagccttgcccctttcctgaaaggcgagaagcaaaagagacagcacccctatgcagcctccgaatggcacagtgaatacgaagtgaccgtcagcccgggacggatgatacgcagtcccagatacaaatacacacactatctggaaggcaacggggaagaactgtatgatatgctgaaggataaaggagaaagacgaaaccttgcccatgaccccaaatactcaaagattctggccgagcaccgggcactgctggacgactacatccgccgcacacaggacgactaccgaagcctgaaagttgaagccgacaagagatggcgcagccacgcaccgggatatcccaaccacgaaggaccctgcgccagagacattatcaatagaaagtaagcaaaaagaactaaaaaaaacagaataatatagatgattatcagtgccttgaccggcacttccattcttttcgcccatcccgctgcaagtcttcaataatattctgcttcaaaagaaggcagttaaagggattttttgtacttttgcgcctcaataagagtaatttgtaatttagtaattgtaattagatactatgttcgataatttaagcgagagacttgaaaggtcgtttaaaattttgaaaggtgagggcaaaatcaccgaaatcaatgttgcggaaaccctgaaagacgtacgtaaggcacttttggatgccgacgtgaactataaggtagccaaaaacttcaccgataccgttaaggaaaaagccttgggacaaaacgtgctgacagccgttaagcccagccagctgatggtaaaaatcgtacacgatgaactgacccagctcatgggcggcgagacttctgaaataaacctcgactccaagcctgccattatcctaatgtccggtttgcaaggctccggtaaaacaactttctccggaaagctggcccgcatgctgaagagcaagaagaacaaaaagccgttattggtggcttgtgacgtgtaccgtcctgccgctatcgagcagttgcgtgtactggctgaacagattgacgtaccgatgtactcggaaccggacagcaaaaatccggtagccattgcccaaaatgccatccaagaagccaaagccaaaggttacgaccttgtaattgtcgatacagccggtcgtctggcagtggatgaggagatgatgaacgagattgccgccatcaagaaggccatcaatccggacgagattctgttcgtagtggattcaatgaccggtcaggatgcagtgaataccgctaaggaattcaacgaacggctcgacttcaatggtgtagtattgaccaaactggatggtgatacccgcggtggtgccgccctttctatccgttcggtggtaaacaagcccatcaagtttgtaggtaccggtgaaaagctggatgccatcgaccagttccatccctcacgtatggccgaccgtattctcggtatgggtgacatcgtatctttggtggaacgtgcgcaggaacaatatgacgaggaagaagccaaacgcctgcaaaagaagattgccaagaaccagttcgacttcaacgacttcctgagccagattgcacaaatcaagaaaatgggtaacttgaaggaacttgcctccatgataccgggcgtaggcaaagccatcaaggatatagacattgacgacaatgccttcaagagcattgaagccatcatctactccatgactccggaagaacgcagcaatccggccattctgaacggttcacgccgccagcgcattgccaaaggtagcggtacgaatattcaggaagtaaaccgcctgctgaaacagtttgaccagacccgcaagatgatgaagatggtcactggcagcaagatgggtaagatgatgccgaaacttaaaagataagataacagcctatgacactgattgatggaaaagcaatttcagagcaagtaaagcaagagattgcagcagaagtagccgagatagtggctcgtgggggtaaacgcccgcatctggccgccattcttgtaggacacgatggaggtagcgaaacctacgttgccgccaaagtaaaagcatgcgaagtttgcggattcaagtcctcacttatccgttacgaggcagacgttaccgaaaaggaactgctcgccaaggtacgcgaattgaacgaggatgcggatgtggacggtttcatcgtacagcttcccttgcccaagcatatctccgagcagaaagtgattgaaaccatcgactaccgcaaggatgtggacggctttcatcccatcaacgtgggacggatgtccattggccttccctgctatgtatccgctactcccaacggtatcctcgaactgctgaagcgctatcagatagagacttcaggcaagaaatgcgtggtattgggacgcagtaacattgtcggcaaacccatggctgccctgatgatgcagaaggcttatcccggcgatgccacagtgaccgtatgccacagccgcagcaaagacctggtaaaggaatgccaggaagcggacatcatcattgctgcgttgggacaaccgaactttgttaaggcggaaatggtcaaggaaggcgctgtcgttattgatgtaggtactacccgtgtgcccgatacctccaagaaatccggattcaagttgaccggtgatgtgaaattcgacgaagtagctcccaaatgttcattcattacccccgtaccgggaggcgtaggtcccatgaccatcgtttcccttatgaagaatacattgctcgccggcaagaaagcaatctaccaataacaaggcgatgaaaacgctcgccgtcttcattgttgtcctactgtatagcgtaaccctttcctcgcaggaaaggattacgctattatttgtcggcgacctgatgcagcaccaggcacaaatagacgctgcacatgtatctgaaggaaaatatgactactcctcctgcttctccctcataaaagagcaaatatcccaggcagacctcgccataggaaatctggaagtcacattggggggcaggccctatcggggctatcctatgttcagcgcccccgatgaatatcttcaggccataaaggacgccggattcgatattttactgacagccaacaaccactgtctggaccgtggaaaaaagggaatggagcgtaccatacaattgcttgactcctccggtattcgttacgcaggcacctacaagaatctgtcggagcgcaggcaacgctatcccctgttcatcaacagaaacggctttcgcattgccctactcaactatacttacggcaccaatggtatcaaggctacctctcccaatatcgtaaactatattgataagaataccatcctgcaagatatccaaagtgccaaggcacgccaaccggatgccattattgcctgcatgcattggggagaggaatatcagtcccttcccaaccgtgagcaacgcgaactggccaactggttgctccaacaaggcgtaacacatattatcggttcacaccctcacgtcattcaaccgatggaactacgtaccaacggtaccgaacagcacatcatagtctactccttgggaaacttcatttccaatatgagcaaggccaacactgacggcggcctcatcttcactttgcagttggagaaacatcctctcccccaacccatccgtccctcttacaccggtcagagtcagacgcccctgccagactccaatcctctgccttttccatactgtcgtgtttcctattgtggatataatctggtctggaccggccggccggaacttactaaagaaaaaaattacattctttatcctgccagttttcctacagaacatttaacgccggaagctcgtaaacacctggaaatctttgtcaaaagctctcgaaagctgctccagcagcacaatataggtatctacgagaagaaaaaataatgcagaaatctcaaaaattttcgtctcattctttgcaatattaaagattatccctatctttgcaccacatttaagaaatgcactaacatggtggctgtagttcagttggttagagcgtcagattgtggttctgaatgtcgtgggttcgagtcccatctgccacccgcaaagaagaggaaattcgaaagaatattcctctttttttgttattgtccaaacaatcccccaaagggaggcaacgtggaatcaagggtcaacgtaacaatctgaggtattttatatttaagcatataatttagcaagtctatataagaaaaaagctctatctcttactcctctgaactgtgctctaaatgctttgattttagcattgaatgactctgctgcggcattggttgccctcctttcaaaaaaattgattatattcagataatgtgtttgtatagaacgtgcgacccttccaaaggtgaggaaccctgatttatctacttcatcataccaccttgccagccttgtcaaagcaatatccttaaacttacactgatgatagattaagcctaaccgcatagacagataatatcctttctttatatcgggatattccttgaaaagaatttcagctcgtattctttgagactgagtccataaggattccttcttgtaaagcagataaatgcttctcgctaacaactgctttcttgtatctccattagcgaaaacaggtgcatgatacatctttccacaggcctttgcataagcaatctgagtggactcttcatccaaagcctcccagcgagcttttacacgcatctcctgcaccgcttcataagctaacttctgtacgtgaaagcgatcggtaacacgtttggccgcaggaaagcagatgcgggcaatctgctccatgttaggagccatatccaaagtaatctcgcgcacttggtaacggcggagacgggatagcttaagcaggacagaagtgaccgtatgaacgtccgtacctttaatgatagcaatcatactacctttaccaccgtgagcttctttattgatcagtacagtatagagttctccacgcgagagggctacctcatcaatacagatataagcaccgatattcttttcgaatagtagccaatcctctgcatgaacaagttggtcccaatggagataaccacttagatggttacggtattgacgctccaataaatctccgtcaactccatataaaacacctaagagcttacaactgatcggatagctatcaatatagttcttttaaaaaagacgcaaaatcttgcgtcatacgagtaccttcagccaccatacgccagttacgagagatatactcattatgcttctttaagatccagcgacgacgacgaatattaaggaagaccttcttgccacgaagaggaaaatcctgaacaataacaggatcataaaagcctttactctcagtatcctgatctgcatacttctcaggaacgatatttttttcctcaaggtagatcacaacttcatttacgctttccttcacatcaacaagagcaaagtactctaaagtgccttcaggaagaagaaggcgataaccgtttaactccataagctatgaatttggagacaaagataataatttataaatttactcctcaggtttttacattgacccatactcctcacagagtatccctacatcataggaaggaatcaattacctaaaccagtccttgtacaaaagagtttactttctcaaaatgttcaaaatagctggaaacttattccgatattttgcattctgtatcaatcacacttaatagtacttccttccttactttatcaagccagtgataagacaacccgttatcaccttatagaaataagaatacaaaaagaatatttcatctttcaaaaaacattctataccaataactctactattttcgatttccgacatgcaaatataaccctttttgtttatacgaaaagcaaaatcagttatctttgcaaagatgaaattcaatcaaatatgaaaattctctggatagacctcaatagctcgtatgcacactcttcgttggcactccctgcactgcacgcacaaatagcaaagaacaattccgtaaaatgggaaatcgtatctgccaccatcaatgaaaacgtaggaatgattgtcgacgaaatataccggcaccaacccgacatcattgccgcaacgacatggttgttcaaccacgaacaactgttgcacatcacagcgagattaaaagcattgcttcccaatagctgcttcatcttgggtggacctgaattcttaggaaacaatgaagactttctgcataaaaaccctttcatcgactgtgtattcaggggagagggagaagaagcattcccccaatggctgtcttgctggaaccagccggaaaaatggaacagtattccgggactctgctatatgaatcctcaaaagcaatatatagacaacggcatagcccgtgtacttaacttttcacggctcgtaccaccggaaaacagctgttttttcaactggagcaaaccattcgtacaactggagactacccgaggctgtttcaacacatgcgcattctgcgtcagcggtgaagaaaaaccggtgcgcacactgtccattgaaagtatccgtgaacgccttcaaattatccacagtcatggaataaaaaacgtacgcgtcctcgaccggacctttaattataatccgcgccgtgctaaagaattactgcaacttttcctggaattcaacccggacatatgctttcacttagaaatacaccctgcactattatccgaagagctgaaaaatgaattgaaaaagctacctaaaggattgctccatctcgaggccggtattcaaagcctgcgcgaaccggtcctccagaaaagccgtcggatgggaagcctggaggactcactgcaaggtcttcgtttcctatgttccctacccaatatggaaacacacgccgacctcattgccggcttgcctctataccgcctatccgaaatatttgaagatgtgcgtacacttgccggatacaatgccggcgagatacagcttgaatccctgaagttacttcccggcacagaaatgagaagaagagcggaagaactaggcatccgatattctcctctccccccttatgaagtgcttcaaacaaatgaaatcagtgtcaacgagcttcaaacagcccggcaactgtcacgtcttctggatggattctataacacaactgcttggcaagccatcacccgcaagctgattctggatgacaacgacttcctacgtcgctttctggaatttttaatcgataaaaatcttatagaccagcccatgagcctggaaaagcgaggcctcgtactctatgaattctgcagtatgcattatccggcctataaaatcatggtcaccattgcctggatagaggcaggcatgtcattaaagaaaaaaccagcagagaaggtcaagaccaagcgccagatgccaccggaatattgggaagtcatctatggaaactacaaagaaagcctccgcttatgttttctacccattgacgacaatacccaaaatggttattggttcggcttcgaatcggaaatacaaaaagcagaaccagtattcaaagccaaaggaataatggagaggtatcaaaatacacaatcaccgcagattaacacagataaaagttcttgattatcagaaattctatagcaatctgtgtaacctgcggcgagttatgccctcatttcttctcctatccgcagtggaaatacttctcgaccagtttcagcatctcctccggactgtcttgtatctctgcacgcaaggttctatcctcgtaagaacgcagtttggaaataaccccatcaaccattgcaggactgaacacatgatattgctcaaagacagcacgctgtctttccaaacaatcggcagaagcggcacaactgtcaggaagctgttccagttgtttcaacttatcttcattttctttcttgtggatatttacattgacatatgttttttctgcaattcctaaagcatcgtctatctcaaatccataacggcaagctacagcaagtccggcaatcaattgatacaaatcggccgaaccgtcaggcgaacgcatttccaccgtctgtttctgtgtagtatcataatgacttggggtctccaacggatttgccaacatgcacatatccgtttttgccgaccagcccaacggaacgcgtaccaataccgaacggttgcggtcgccccagcaaatgttggtcggtgcttcctgatgaggaaccagacgaaaataggaagtaggatttgtattaccgaaagctgtaatggaagaagccagcttcatcatgcccgcaatggccttacgggctgtttcagaaagtgccccatctttcagcatctggttctgcccgtccttcatgatacgcatatgtatatgtaatccggaaccggcttttcctgccgtgattttcggtgcaaaagtaatgttatatccatactggctagccagattacgaataacccattttgctatcaccagttggtcagcagcctcctcggcacgcaccggcaggaattctatttcattctgctcataaatcttatcgtccagcgtaaaattaccgacttcagaatgcccatactttatctgtccgcctgcctgcgcaatatatgacatacattccgtacggaaatcattgaacttggcataaggggccgattcgtgataaccacgctggtcggtagccgggaacaatccgtcattttcagaaatgacataatattccaattctcccatagcctgaaattccatccccgtaaccgtagtgaatgcctgacatgccttacgcagggtatattccggagaactttccagcggttcaccatccttattgaaataagaacagagcattgacagtgtgggcaattcagaaaaagggtctataaaagcggtccggaaacgcggcactacatacaaatcactgctaccggcctctataaacggaaacaagctggaaccatctacgcgttcaccacatgtaagtatggcatcaaggtatgcttcattattgatgacaaagttcagtgtcttcagtctcccgtctgccgcaggatacatgaagttcaccatacgaatgtcgttctcctttatataggaaacaatgtctgctttcgtaaattcggaagccggtttttgaagggcagccaccaatagattggggctcatggataattcctggttcataatacgctgattgtttttagttttctatatggttaacaaaacacatgcaattttctgtcacaataaaaaactgctgtttcgcaaagatactaaaagttgtatcagaaaaaaaacaaacaacctaaatcttatcagtgagtctcaaccttttccgtcgtatccccacttcacgtaaatagctccccaggcaaatcctgctccgaatgctgtaaaaatcagtttatccccctttttaagcttatcctcgaaatcccatacacacaacggaagcgtgccggcacttgtatttccataccgttctatattgaccattaccttttcgggagatactcccaagcgttgcgaaactgcagtaattatacgcatgtttgcctgatggggaatcacccagtcaatgtcctccttcgtcaagtgattcctctccatgaccgcctcacaagcatccgccatattggccacagcatatttaaagactgtacgtccttcctgataaatataatgcatccgattgtccagtgtatagtaagatggagcacatacggaacctcctgctttgatatgtaaaaagggcagacctttcccgtctgttctcaatacggcatccattactcccatatcttcccgggtgggttccagcatgaaagcggcagcaccgtcaccaaaaatcggacaagtggcacgatcggtataatcaatcaccgacgacattttatcagcccctactacaatgaccttcttgtattttcccgaacggataaaattggctccagtttccaatgcatacaaaaagccactacaaacagcctgcatatcaaaagcaaaagcattcttaagctttactctctcacataatatggatgctgttgaaggaaaatgataatcggccgttgtagtggccacaatcaccaaatcaatatcatcaggattagattttgtacgttgcattaattgttttacagctttacgggccataaacgaagtccccaatccttcttcgtgcaagatacgtctttcctttataccgatacgccccattatccactcatctgtcgtatctaccattttggatatttcttcattggtcagaatatagtcaggaacataccctcccactcccgtaattactgcatttattttctccattaattctatctagtttagtattggaatcggctcaaagataatattcttaaaacgccgagcgcaaatatactgaaaagagggtaaaatccaataaaggaagaacaaaaagacactcccgacaaactatcacatggatatacaaaaaaaatcaactgtcctttttctatcattcttttgtcaattttgtatcaatgagtttgagcaatacagactaaatttgcataataaaatgtatcgggtatttaaagagcaagtaactaatcaaaaatacatacaaataaaattaacataacatttttatatcttatgaaacaaaaccgcttaattagcattggggctttcattttagtgcttgcactttcaggccttatgacaggttgtatggagaaagacgtatacgacccgaatcgtgaaaaagaacctcttcctgacccggataaatatttcggctttgagatgcgcagtgatgtccggctttctgtcaactatgacatttacgggtttactcctttgatagaaatttacggtgaaaatccgatggaaacagtggaaggtacgccgataaagaaagagggtatagaagccttgttcaaaacctataccgacaacagcggtaagtatgagggaaaaatgcagcttcctacctatcttaataaagtttatttatatactgcgacatggggattgccgggatgcatagaacttgaaattaaagacaatgctgtcatttttgacatgtcggcaaaatcaaatcctaaaacaaagtctgtcactcgcgcttcgtctgatgtaccttatttagtaaacaaatcccaaaatctatactcactgtgctattggggagaaggaggtcagctgaacagccaatatatgacaaaggaaaaaaatattggtaatgaaagtattttggatttgacagaccggatgaaaacattcttcaataaaggaggacaagacaattcaaaattacttggtaatggaaaaactatcaatatttcgataaaggaggacaacaccgcattgaatctcatttttctcaatcgaagtgcaagttataacaatactttcggatattatttttataaaaccggaacgtccgtcgatgtagaccaagtgaggaaatacattatattccccaatgtgtcttttgactggtatggcggccaaatattgattttagaatccgggaataaagttcgtctgctttacttcgatgaagacggccaagcccatgatacattcccagcaggatatacagtaggctggtttctttatgccgacggttttaagaacggttatggaaataatttagaagattatcttaaattgcctgatttatataatccatacaattcaaatcttcgcacttccaatccccaaaacaacatgtcggtctttgtctctgttaaagaccaaaaaagcggcaagacgattcttggagcagaagatggtgtaaatcaaagctactgtgaccttttattttatgtagatgctactccgggaagttctattgacgatcctgaaaggccgtctattcccgatgaaggtgataaagaagaacccaaacccgatgaagatgaaaatgttaccggcacactggcattcgaagatatttggccttccggtggcgattatgacatgaatgacgtaattgtagaatacgaacgcaaagtctatttcgacaaaaagaatatagtaacgaagatcgtcgacgaattcactccggtacatgatggcgctacatatgttaacgcatttgcctatcagatagatgcagcacaaattggcgataaaatcactttgccggaaggtgcaatattggaaaaagagacttcgtccattatcgtaatgtccaatgccaaacagaatataggcaataaatatgtagtcaccagagaattcaacggttctttcctaaagaatcagctattgtcctataatccatacatcatcgtaaaatattcacaaggagaacagaatcgcacagaggttcatctgcccaaacacaaagctacagcttatgccaatcagtcattgattggcagcaatgatgatgcttactatatcgaccgtaaaggagcatatccatttgctatcgatataccgatgctagggtttaccccggtaacagaaaggaacagaattgacagccaatatcccggttttgctacatgggcaaaatcaatgggaaatgactgtaaggattggtataaaaaataacagaacaaaagacaatgaatcatgtgtggagtgcccccttattcggacgctccacctgtttttttttgaattattgcatattgacttggagaaatattatattctgccatgaaacacctggaaaaataagaaggattggaatagcctaccatatacattacttccgatacagtgaatctgccttgtaataaaagtgtagcggctcttatcatcctaacacgccgaataaggcttactggagtaacccccgtcaactgtttaatctttcgatacaacagttttcgattcattcccaacagttgacagagcatagcaacattaaactctgtattttccatatgctcttccaacactgaaacaagcttgttaagccaaattcgtttcaattccagttgtctgttttccaatggtttgcatgaatccattttctccaattttaatattccttctaagatctgtttggcttgtagtgagtccataccaacttgattttgcaaagcctgcagttcatttttatctggtaaagacacaataatattaattaagactccagtatcattttcctcacatcttatgtcaacctggccttgatatagattaacaaatttgggaattaaatgtaaccccacaagagcgattatttcatctattattttaagatattctttcatatctttcttgccttttggtataagtacaaattatccaaatatcagacaaacattctctcacggtattctgacggagtagtgcctgtatgcttacgaaaaaaacgtgtcatcgtagaattcgattgaaaattagttcgtgaaaccacttcctttatttcaagattggagtctttcaataagacttttatctcaagtatggtatattccacaatccactctttagccgaacgaccagtattatctgttattaacattgtcagatatttaggtgagatacacatcttatctgcataaaatgccacatcacgacttatagtatgatactctataaccaaataaaagaattcaaaaacctgcttctctttacgtacaaacttcacggaagccatagccttggggttactcttatagcccacatacaagtcccaataataaaccctcaataaatacatcaccgattccctcctaagaaaggcacaagataaatctacacggcatgacaatatatgacagaaatgaacaaagcgcttatactcttcttcactgagcggagagctataatatttcctcatatagaaaaaatagtcaagtgtaagcctacccagcccattaatggtatccataaacaatttctttggtactttaaagaaaataacggcaaagtctgtactgatttcggttatacttgccaactgataaggaaaaatagttatcaaatcattcttcacaaccctgcgtttattagaaaacacattaaaaagagcagagcctccggtacaaactccatttatcccttcttctagatatgtcggaatcccgtcaagaggcaaatcaattacctttgtataaatattgaactcctctaaatcaaacacaccacttgaaaaaggcctattatcttttgtagcttttaccatatttgttttaaatattatgctaagttacaaaagaaaatcatttttagattatttgttctaaaattgcacatatatactgaagttcagtcaaaactaaagtataaattcttattctataaagggctaaataatatccgatagggcagagataatggaataaaaaaagtcccacaaatcgttgaatttatgagacttacctagggtcaatgtaaaaacctgaggggtaaatttataaattattatctttgtctccaaattcatagcttatggagttaaacggttatcgccttcttcttcctgaaggcactttagagtactttgctcttgttgatgtgaaggaaagcgtaaatgaagttgtgatctaccttgaggaaaaaaatatcgttcctgagaagtatgcagatcaggatactgagagtaaaggcttttatgatcctgttattgttcaggattttcctcttcgtggcaagaaggtcttccttaatattcgtcgtcgtcgctggatcttaaagaagcataatgagtatatctctcgtaactggcgtatggtggctgaaggtactcgtatgacgcaagattttgcgtcttttttaaaagaactatattgatagctatccgatcagttgtaagctcttaggtgttttatatggagttgacggagatttattggagcgtcaataccgtaaccatctaagtggttatctccattgggaccaacttgttcatgcagaggattggctactattcgaaaagaatatcggtgcttatatctgtattgatgaggtagccctctcgcgtggagaactctatactgtactgatcaataaagaagctcacggtggtaaaggtagtatgattgctatcattaaaggtacggacgttcatacggtcacttctgtcctgcttaagctatcccgtctccgccgttaccaagtgcgcgagattactttggatatggctcctaacatggagcagattgcccgcatctgctttcctgcggccaaacgtgttaccgatcgctttcacgtacagaagttagcttatgaagcggtgcaggagatgcgtgtaaaagctcgctgggaggctttggatgaagagtccactcagattgcttatgcaaaggcctgtggaaagatgtatcatgcacctgttttcgctaatggagatacaagaaagcagttgttagcgagaagcatttatctgctttacaagaaggaatccttatggactcagtctcaaagaatacgagctgaaattcttttcaaggaatatcccgatataaagaaaggatattatctgtctatgcggttaggcttaatctatcatcagtgtaagtttaaggatattgctttgacaaggctggcaaggtggtatgatgaagtagataaatcagggttcctcacctttggaagggtcgcacgttctatacaaacacattatctgaatataatcaatttttttgaaaggagggcaaccaatgccgcagcagagtcattcaatgctaaaatcaaagcatttagagcacagttcagaggagtaagagatagagcttttttcttatatagacttgctaaattatatgcttaaatataaaatacctcagattgttacgttgaccccttacctattcattatccagttagttcagcggagagacaggattatgaacctttctctccaaaatccttatgaatcaacattttaattcagttcaatttttcaagtgtaacgatttagtaactgaaaactgtctttttgtgtcactcatagactttcacttgtctaagctttatcattacagtacaaagataataatattattatttcatttggcatagaaatatacttattcttaaaaaacttttcagaatatatagtgtctcaaattatacatgcaaaacaattccatatatattataattgaaatttaagtcctaattctttagctacaatatttataattcttattgcattatcccaacatccgcaacattctggacttagagctatggttaatacagctactttatccatcttctgatttagattttgtatggttgaccttatataatcatctgtaaataattgcattccatcttcattaaaaaaataatccaaatctatattaaaaatccacttcgtattttgtgacctttctaaccagtaatctatgttattatatagctcaaaggcattaggacgataagtaatatttaacttatttgaaccatttaagaaattatcatccacataattatgcgttgaaaaataacattcagtgaaccaattgggaaacaagtaatttatttgttttatataattatcccattgaaacactttataaatatgcatatcattttcatttattttaaattctaagtttgtatattcatcaagagttaaataaggattatcttttataaataagtatttttctattggagcattattaagtaaatctgcatgtctatcaatatgaaaaaaattataagacttatctatatccaattcttgtagccacgcccaccctgcggccaaatgattgtccataatatatatattcttatatttatatacaaaattaagatttgcaatttctgatttttgctgtttcaaattttctggcaattcctttatccacatattcttttatatttataattacccaataaatataaacaaaatcttttttataatatcaaaaagatcatcttattttatataaaagccattattcccaattaaagtcctattttctcgataaagataagaaaagagtataccttaatcagcataagttctcaagtttaccaaattattagaagataaaattaatgtcagttaatttcttcggaatatagaaaaaatcggttttaatacaccaattcaaattgtacgagatatcggataattatccgagtttatacatctatcatagacatatcaaagaaaggtttaaagaagtaaactccataaagaaatatattattcaacaccgataagcaatataaaataagaaagtacactatagggtgatgttttgttttcgaataaatatttgaatatcagtattttaaatcaatgttagatattaaacaaatatatgcttgtaagatactttatataatttaatcatatgatattaaattaattatcatcttttttacattatatttattacaccattttcaccatttgcccttcttactgcaccatcgagatatttcaaaagtcgatggagaacatatttatcaagaccttttctttttacacattcaatttctaatttagatttaagttcggtcagaacttctaaatcttcagaaaacctattacaccctggacctagttgaagataaaagccataatgattgctgaagaattcttctaatgaaaaaagacctgcattactcaatctacatatattgttatatagcatttctacatcaatatttttaaaaacagaggtcatattgtaaagacattgatgatctggcgttgattctccacttaaatttacaagttggctaacattttcatctgtaatatttgaaagtgcaatttcaaacttattcatcaatttcttatcacaatcgtcaaatatattatttgcatattcaagaatatctctccctataaaagttttgtaaaattcgccaaaagaactaacaccttcattaaacgcaactctaagtttgtatagctcatctttttctgtttgcttgcaataattatcgtgaatatgtttttttgctaaggatacagtggcctgagtaacccaataaatacatctctcattaaagaatgcgagaatggctagtgaccgtccaaacatatacatgttaggaacattaaatttttgcacatctttcatcaatgtagtacaatcttcttcaaaagcttcagatgacatgttcataaagtttgcaagtctctcttgtagattaacaccacattgcatttgagcaagcattttttcaacataagtcttaatgctatatcctgtttctatgtcatatacaatttgcgggatatgattattgctgagtacttcaaaattatatttttctacaatattcctatatttttgctgtaaagcttttatcttgctttttatttcatcatttccaaacattccaacagaatagttcaaattccactgtgtaaataaatcatgatactggctgcgatagtcgcaatagacagcaatatacgaagctaataaggattgcataaagttattactattttctaataaatcctttctaatttctgaatataatacattaaaatcgtataaacattgtcgtaagatacgaagattattacatcctgtagaaagaaagacatccaatatcaattctttttgattttgtaaccactcggataatggaatgtcctcagtaagaaaatatgtaatagcagcatcaatatcaggtttaacttcaaattcacgtcctacagttttctccttaaattcagttaaaatattctttgcgttctctataacatgtgtttcatcccccacaataattacatgacaagaaccatgttccacaaaattattgatatatcccaaaagaagtttcatatctattagacagcgctctaaatcatcaaaaaccagtaatttagtccccacaaattcgctatctttagaagataataaagaaagagaatctaaagttgcatcgaatgacacatcttctttactatccttattccaatcaagagtcgtcttgaaaacaattttgccagcgattttaaataattttttcgtgaattctgctcctttcgaatacaagaatggatgtaatacctgatctatacaccttgtaatttgagaagtttcttttagaccatataaagatacataaatcggttcaagtgaattttctcctttcaaatacttttctttatatttatcaagccaattgcaaacaaaaaatgattttccacatccccatctaccctttaacataacagcatatcgtggatctgggttttctgcataatgtagtaaatattgaaaaattcgtccattcataatttaaaattgaaagatcgttttcgttcataagttattatgaagaaaagtataactaacagaaaatagattactgtttcgaactgataatagtaatagattacgaattagttcgttatcttctattttgttcttctgcatattacctaatcttcaaagaagctttatatacaaaggtatcattttagcggtatatatagaaataaaaaatcagctttttaagctctatagacaaatatttaagtaaaagataattttgacatataaacatcattaccaataaaatagactaccatattccagcaattgcataagcaaggctcttacttctgcgactatactacagatacttttacatctgttttctgccgatattctcttttcagttttatttaatcaaaaacggaactcattgctaacaacatatcctataaatgaaaaactccatacccatgactgaaaactgaaaataaatgcaaccgtatatctaaattagtttagccacattattccatatcccttctgaaaaccacttctgcctgatgcgcaaaagccgatttcagaaacagtacaagcaaaagaaaagcccacagcgaccacaatgtcataaatgacactgccatcgccgtgggcacttcttttatatgcttgtactaaaacggtaaaaccgttcttatagtcattatttcatccatatacaagtagccgaaaaatgccacttctacaggacacgccaagcgtggatctgttcttgtgaccattttcggctacaatgtcccgtgtcgtaaaaccagtttgccttccattgcagacaaagcaacggcagacaatcccgttttactacaatgtaccaccggaggaacagtaaccgcaagccatgcacgcatgacaatgacggttacaggacttccacacggcggtcggaaagccaactttccccttagttgtagcaccgcccttaatccgtccacatggcgctgcacgccaatacttctgttcccttttcctttccgcctctctatgcgtatgcctctgtttccatgccgccatccaggacggcatcaggtgtcattttcgttgcttggggcaaaggtaaagacgggattaggaacacaaattttttgtcgaaaaatctccacgccctttcaggggtagtattttgtctaaaaaatttgctaatcctactccctaacctttgagaagcccccgaaacgaaaacgaccaatgcggtcggaagacgtcacaagaaaacatcggacatacagagaggcgaaaagaaaaagagaccgcccactccaaatccggacaaggtaatcaacaatctaaaatcggaaaatatgagaatgacattgagtgacatcggaaaggcattgtggaaagcattatccgcagcagtaacggcaacatcaaacgtagccttttgtgctggcagtttggtagtaggtatcataggagaaatcctattcggcatgttgagcatcatgttcggcatcctaatctccctattttcagtaatggcggcaatcggctttttcatttggttattaactatttaacaaataaggatatggcaagacgatacagcaagacagcagcgcagcaatgcagattttatgaggtggacaacatctttgagtatatggtggaaacctacatcaacggcaaccattcaaccttaagaaggctataccacgaactcaacaaggaagcgagaaaggattttatcggttttcttttggtggaatgccccccacaataccacacggagattttacaagagattgtctgaccacataaaggaacggatatgaacaggacaacggaaaagatacccacatggagtttagcctatatcatcaatggcgatgcaaccgcactcacagacgatgaagttcagacaatagacagatggatgaagcaatggcaagtacaagatgtttcacccctcacagatgaagaagggaacgcacagccttatttcacccattacccccttttcggacttcccacagaagtggaagattgcgagatactttatttgagcgacaacccgactaaaatttgagattatgaaaggaacagaccatttcaaacgaaccatacagatgtttttggagcagagagcagcggaagatgaactattcgccaaaagctaccgcaacccagccaagaacatagacgattgtgtcacatacattctgaactatgtgcagaaaagcggttgcaacggcttttcagacggagagatttacggacaagccattcactattacgatgaaaacgagattgaagtaggcaagcctatacaatgtcaagtagttgtaaaccatgtggtggaactgacagaagaggaaaagcaggaagcaaggagaaaggcggttgcccaatatcagctgatggaactccaaaagctacagaaccgcaacaagccgacagcgaaaaaagaaacacaagtccaaccctcattatttgatttttgatatgaaaccgagaacacgcatacagaaagagtgtagctaacacttgaaaagggacccgggtagcatttgaaacgtgccccacccatgggtatgtttaaccgaacaaaattggtatattcataaaaaccaatggcgttcataatatgtaccacatggaagaaagagattccataattctcgcctataggcgtgacggattgagcatccgtgagatcgcccgtcgtaacggcatgagccgcaagactgtacgcaagtatctccgggctttcgaacaagcggtcggtgacaaccccgatgcggaagcaatggacacgtacctgcagcagccggtgcgctatgacagcagcaaacgtgtccgcagagtgatgaaccagcaggtgatggaggcgatagacggcttcatggcccgcaaccggtctaatgccgcggccggattgcgcaagcagcagatgcgcaagattgacatgtggcgccggttgcgcgatcaaggcatagagattgcctattcgacggtatgccagtatgtccgtgcattggaagtggcggtgtccgctccagccaagtccccggcggcgttcatccgccaggagtatgaaccggggttccggtgcgagtttgactggggcgtgctgacactttggattgccggtgtcaagacgaagctgcacatggccgtgttcacgatgaaccatagcaacctgcggcgggcatacctgttctcccgcgaggacacgttggccctgatggaagcacaccgcaactgcttccgtgctttggggggcacgccgcaagtaatggcctacgataacatgcgggtggccgtcaagaagttccttggacaggagcgcgaacataccgatgccctgcgccgcatggaactccactattgtttcacccctcatttctgtaatccgcgttcgggatgggagaaaggtaaggtggagcgttcggtggaacatatccgccggcgggctttcgcctatgatgtccgtttcggttcgctggagcaggcgcagtgtcatcttgacaaggtctgtgacaggctcaacggggaggcttccaacatgtctgcgcaagagaagaaggagcgcgtacaggccgatattgcggctttgcggccgcttgaccacggtgacatgggctgctttgagcagcggcatgcccgtgtcgggaagtattccaccattaccgtcgatggtgtgcattactctgtgcctgaccggcttgtcggtcgggaggtacccataaagatgtattccgagcgtattgtcgtgcttgacggtcgcgacaaggtagccacgtatgtacgctcccggcgtctcggtgactggtgtatcgacctgatgcactatctgggcacgttccttcgcaagcctgcggcgttgggacgatccacggccatgcgacaggtacacccggacgtggcggcactgtttcgcaaacattttacggattctcccagatcgtttgtcgaactgctcgtgtttacccgtgacaaccagcgcacttatgccgacatactggctgcggcagaccgtctgtcctcccggggactcaaacgcctgtcttccgaacaattgagcgccgagatgctggccagtgacggcaatggaaccgcaaacgtccgtcaagacgcagccaccctgaccccgtccgatccacaacagaccgccattgaagaatcggcctcacagacattggacacactttcggcgatgatcggatgtggcgccacacaacaacctgtaaacaaagttaccgtctaacaacataaaaattgcatagcaatggaacaaaacgaaaatcaagactccatacgcgaacggatacgtgcgtatgccttcgacctcaaactccctctggtacgacgcgacatcgacctgcttatacagcaaggacttgatgaacgatggaacctgtggatgttcacggccgaactcctgcgtcaggaaaaagaaaaccgctcggagaaccagcgtcggcatcgcatcaaaaatgccgcgttcccacagttgcgatacctcaacgaaatagacacggacgcgcttccgccagaagcgcggaaggccttgccaaaccttgagacacttgatttcatcaaggaagggcgcaaccttatactatacgggaatcccggtaccggaaagacccatctggctacagccttggggattgcggcctgtaacgcgggatactccgtactgttcacttccgtgcccagactgcttacgcagataagggaatgccggaacgcaatgacactaagggcactcgagaacaagttcgaacgatacgacatggtcatctgcgacgagttcggatacgtttcttgtgacaaggcgggagcggagatgttgttcaaccatctgtcactcagaactgacaagaaaacaaccgtcattacaacaaatctcgcattcaacagatgggacgagattattgcagacaaagtactagttacagcaatggtagacaggctaacgcacaaggcgattctactgaacatgacgggaaaatcgtacagaatgaaagaaacacaagatatgataaataaacaaatttaattaactttgcaaaacctatcgggtggtacacgtttcaaatgctacccgggtcccttttcaagtgttagctacaactaatgataacaatttagatgtgagatatttagacggtggacaaattcggacttccggtggtcattttcggacaaatcgttaccgtttttgtccggtaggaaaagggtaacgatttagtaacgaaactatgtcttttcaagtccttttgttgtcttggaaacaagacttataggcaataaaaaaacctacaaatcgctgatttgtaggtttttgtcctcttactgtccttgtttgtccagtaggttctgcggagagacagggattcgaaccccgggtgcctcgcagcacaacggttttcaagaccgccgcaatcgaccactctgccacctctccaaaacttctttttcagaagtacttttctttgaaagcggtgcaaagatacaaatcattttttattctacaaacttttctgcacaaaaacagagcaattataccaaaattcttgtttatacccactacggaacgaacataacggcatttaggctatttgttgaaatttatcaagggcaagacagagttttataacttactggctatcagtatatttacaaagagccacattcagtatacgattgaaccctattcagtatacgactgaatggcattcactatacgactgaattaggttcagaatacgactgttccttaaacctacatcatttgtaaataatgcagattattattcggttcttgtttcaattcataaaccacatataaagaaagtattaacatctctactcccccggacattcactacctaataatagttattttatgctgttcaacataaaaagagaagtatctcttataaaattacggaatttattcagtatttttgcgcgctctaaaggataacattatctaacctactaacaaaaacaaattttatggaattgaacaaaacctttaccaacgggctttggagcaaagaaatcaatgtcagtgatttcgtcagtaaaaacatcgcaccctataccggagatgcatctttcctgcagggacctaccgaacgtaccaaacgtatctgggacatctgtctgaaggctctcgaagaagaaagaaacaacaatggcgtccgttcactggacaacaccaccgtatctaccatcacttctcataaagccgggtatattgataaagacaatgaacttattgtcggtttgcagactgacgaactgttgaaacgatccatcaaacctttcggaggaatcaacgtggtagcaaaagcatgccgtgaaaacggagtggaagtggacgataaagtaaaagacatcttcacccattaccgcaaaacacataacgacggcgtattcgatgtatataccgaagaaatccgttccttccgttcattgggattcctgaccggtcttcccgacaactatgctcgcggacgtatcatcggtgactaccgtcgtctggcactctacggcatcgaccgacttgtcgaagccaagcaagaagacttgcgcaatctgacaggtcccatgaccgaagcccgtatccgtctgcgtgaagaagtagcagagcaaatcaaggctctgaaagacatcaaagtgatgggcgaatactacggactcgacctcagccgccccgcaacatcagcgcaagaagctgtgcaatgggtatatatggcttatctggctgccgtgaaagaacaagacggtgctgccatgtcattgggcaatgtatcttcattcctcgacatcttcatcgagtatgatttggctcacggcaagattgacgaaacttttgcacaagaactgatagaccagttcgtcatcaagctgcgcatggtacgccatctgcgtatgcagtcgtacaatgacatctttgccggagacccgacttgggtgaccgaagccattggcggccgtttcaacgacggacgtgtgaaagtgaccaaaacctctttccgttttctgcaaaccctatacaatctcggtccttctcccgaaccaaacatgacggtactgtggagcccggaactaccggaaggtttcaaggatttctgtgccaaagtttccgtagacacaagctctatccaatacgagaacgataacctgatgcgcgaagtgcgcaactgcgacgattacggcattgcctgctgtgtatcctaccaagccatcggcaagcaaatccagttcttcggcgcacgtgccaaccttgccaaggccctgctgcttgccatcaacggtggccgttgcgaaaacaccggaactgtcatggtgaaaggtattcccgtattgaccggcgagacactgaagtttgaggaagttatggccaactacaagaaggtactgactgaaatagcccgtgtctacaacgaggccatgaatatcatccactacatgcatgataagtattattatgagaaagcccagatggcattcatcgataccgacccacgcatcaatctggcatacggtgttgccggcctttccatcgccatagactcactgtccgccatcaaatatgccaaagtcactgcacgccgcaacgaaatcggcctgaccgaaggtttcgacaccgaaggctcattcccctgcttcggcaataatgacgaccgtgtggaccacctgggagtagacctcgtttactatttcagcgaagaactgaaaaagctgcctgtctacaagaatgcccgtcccaccctttccttgctgactatcacctccaacgtgatgtacggcaagaagaccggtgccactccggacggacgcgccaaaggtgttgcctttgctccgggtgccaacccaatgcacggacgtgacaagaacggtgccatcgcttccttgagctccgtagccaaattgcgctaccgcgactcgcaggacggcatcagcaatacgttctccattgttcccaaatcactgggcccgacaccggaagaacgtgtagagaacctggtaaccatgatggacggctacttcaccaaaggtgcccaccatttgaacgtaaacgtactgaaccgcgaaatgctggaagatgccatggaacatcctgaaaagtatccgcaactcaccatccgcgtttccggctatgccgtgaacttcgtgaagttgagccgcgagcatcagttggaagtcatcagccgttcattccacgaaagaatgtaatatgataaatgtacactcctacgaaagtatgggaacattcgacgggccgggtctccggctcgtcgttttcctgcaaggatgtccgttccgttgtctgtattgtgccaatccggatacgattgatgtaaaaggaggcactcccaccactccggaagagattctgcaaatggctatcagccaaaaggcattcttcgggaagaaaggaggtattactttctccggcggtgagcctaccctgcaagcagaagcgctgattcctcttttcaaggagctgaaggcgaacggcatccatatctgtctggacagtaacggaggcatctggaatgaaaaggtggaagagctctttagtctgactgacctcgtgctgctggacatcaagcaattcaatcccgaacgccaccgtacgctgacgggacgaagcaacgaacagacactccgcaccgctgcctggctcgaagaacatgaacaccccttctggctgcgctatgtactggtccccggttacagcgattcggaagaagacacccgcctgctgggtgaaagtcttggcaaataccagcagatacaacgggtggaaatacttccttatcaccgtctgggtgttcacaaatacgaagccatgggatgggattacaaattgaaagaagtgaaggaaaatactccggaacaactggaacgggcagaaaaactgttcaaagagtatttcacgaatgtgataaccaactaaaacagaaaagcaaggctgtccggatatgattccagacagccttgcttttcatttatagggtaagaatcctattctttcaagttataggtaatctgctgtacatcatcactactgccacccaccataaagacgaaatcaccaggttctaccatataattcatctcattgtcatagaatcccagtgcatcgtcagttatctgaaaagctacagttttgctttcacccacattcagatgaattttcctgaagcccttcaattcctttatcggacgcgtaacagaggctaccttatcctgcacatacaattgaactacttcctctcctgcacacttaccggtattagtcacttttaccgacacctccgtatggacgcctgcagccttgcccggcagcagtttcaaatcagaatatccaaaatccgtgtacgaaagcccatatccgaaaggataggcaggctcagtggaagcatcgatataagatgccttataggtctgtttcaatgcggtagggcggccggtgctcttattctgataataaatgggaatctgtcctacgtgtgcaggaaatgtcatgggcaatttagccgaaggattatactctccccacaacacattgcatatggcattgccggcctcacttcccagccaccaagtacacagtaccgcatcagcatgttcccttatctcattgaagattaccggacgcccacacatgacaagagcaatgacaggttttccagtctttgccagttccgacaccagcttctgctgcccctcgggtatggctatattcactttggaagccttctcgccactctgaccgaatctctcgcctaccgccacaacaatgacatccgaagcctcagcagcctgtaatgcttcctgcaatccggtcaactgattgctcttcatatcatagccttcagcatagctcacctccagtcctttccggaccaatgcatcatataaggtcaccactttgttccggtccgtagtggcagcccaagcacctgccatatcgtactgggattttgagagtcctcctatcaaggctatcttcctcgtctgtgccgtcaacggaagcacagattccctattctccagcaatacaacggaacgctcggccatacggagcgaagcattacggacttcgggcgcattgagtattctggccgctctttccggattacagtagcgaaaagggtcctcaaacaatcccaactcatatttcttctccaatatacgccgtactgcatcatcaagcacactctcctttactttcccttcttgaacaagctccttcagataagtcaagtagcaggtacttaccatctccatgtccagaccagcattcagcgctttggctgcggcatctttcttgtcaacagcataacggtggttcaccaattcctctaccgaattataatcggacacaacaaatcccttaaatccccactgctctctcaatagccggttgagcaagaaatcattggcagtacaaggaatattattaaaatcattgaaagcactcatcacggtagctgctcctacctttatggccgccttatagggaggcatataaaaattggcaaagtggcccattgacatatccacactattatactcctttcctgctatcggtgcaccatatccggcaaaatgtttcatacatgccatgacagtcgtcgtgtctgccaaatcgtctccttgcaagcctctgacacgcgcctccgctacccgagaaccataataagggtcctcaccggccccttccatgacgcgtccccaacgtgcgtcccacgaaatatccaccatcggggcaaaaacccagttcaaaccatcggcggcactttccaaagcattgtagcgtgcagcttcctcaatcatggccaaatcgaaacttgcagcctcggcaagcggaagcggaaatccggtacgatagccgtggataacatccagtccgaaaattaaaggaatgcgcaaacgcgattgcaaagcaagctcttgataacggcgtatatcctttactcctatcacattcagcatagagcctattctgccttgccggacatactcttctttaggaatatttccaccgtcgggtccggtaaaattccctcggtaggtgcattgtgcaagctggcctatcttttcatccagcgtcatctgcttcatcaagcttgagatgaatttctccttctccgtagtttgtgccgaggtaaaggtgttaccaagtccccacagacaaaccatcagtattattatctttttcatactgccattcttgttttgatatttattttatcataaaacaaaagttgccttcaatggtaaatcagctgaagaaggacctgccagaatctcaaaagtccccttttccactacaaaccgatgtgattccacatcatagtaggcaaaggcttcctcatccagcaatatccgaacgcgcttggtttcacccttcttcaagtaaaccttatcgtagcctttcaactccttcaacggacgcggaacagaacattccacatcccgcacatatacctgagccgcttccgcagcatccatctttccggtattcttgatgtcaaagcttaccgtaacccggcttccccccgtcttctcaacactcagattactatattcaaaactactgtatgacagtccatacccgaaaggatagagcggctgctttccgttccggtcatatcccctataacctacgaaaacaccttcggcatactgcacccgtttatgaggtacattgcgattgtcataataattaccatataccggattatcttcccatttttcctcgatgctgactggtagtttgccacttggcgaaagcttgcccgtaatgatttcggcaagggcctttccaccctcctgccccggataccatgccatcaaaatagcttgtacactctgcccccaattgcggaaatctattccacctccggcattcaccaccacagccacattatcatgaagtgaagccactttattaatgagatattcctgcccgtatgacaatgcaaacggacggtcgaacccttcaccttctgtactgctgttgaacccggcacatacaataacattcctggcatgcttcagtgaagaggccaaacgctcctcatccatcattcctgcctggaaactgacagtcgcctcacccacattatcaaaatattcaatacgcaaccggtatatctcccctgcactgacctgcataaatgcactgcgggtactgaatgaatggttcccccaatctccggtaatcagcttatcgtttacaaacagacggtatccgtcatcgccagccagctggaacttgacagttccatccttgtcagccttgtaaactcccgtccaacgggcagaaaactgatctaccggcatgccgtcgaacggtgcaccgtatttccaggcatggtctatggcaggctctatggcagcttgaaagagttctccggtaagattacgagtattataatattcgcccttaaaaccgttttgcgtaaaactgccatccgtataaatctgttgggacatatccttataaagaatgctgtcagacagcagctctatctgtctgccgcccttcaactgaaccataccgtcatagagtgacactaccgaataaggggtgacaaatccgcttcctcctcctgtgggaataatatcggcattaggcccgattaccaatgttctaccgttccggtaaggcaacgtaccgttatcatttttcaataagactactccttctctcgccaagtcaagtgcaatttccttagactgtgcattgtctttatcgatagatttatcttctctcggagtatcaagtgctccaaaagcaatcaatgtctggagtatatgccggactttggcgtcaatggtctcttccttcacgataccattctctattgccggaataagaatttccctggtcatgaatttaccgacgggcatttccaaatccaaccctccattagcggctcccacaccggaatatacagatgtccagtcagacatcaggatacctttaaatccccactgcttgcgtaatacatcaatgttcagccagctgttttcggtggcatgtaccccgttcagcggattatagctatccataaccgcccctactcctgcttcctgcacagcttttcggaacgcgggaaaataaatttcctgcagcgtgcgttcatccacatctgagctggcatgatgtctgctccactcctggttattggccgcaaaatgcttcaccgtagccataactccctcttcctgcactcccaagatatattctttagcagtttcgcccgttaaataagggtcttcaccaaaatactcatagtttcgcccgcatagaggagagcggtagatattgactccaggccccaacagaatacttaccccacgggcctttgcatcccgggccaaaccatgtcccagctctctagccaacttacggttccatgtcgaagccgacaagatgccacaaggatacaaggtactttgagtattgttacgtatgccttgcggaccatcggccatcctgatttcgggtatgccaagccggggtacagcccggatataaaaagatttgggaccggaaatgtaatcgattttttcttccagcgtcatttgagaaaccaactccctggcacgctgctccacctggggagtaatacacacttgtgcttttgccgtgattgcacaacaaagcaatagcccgcttaaggctactttctttttaatcttcattttgtctattttactacgtgtttgttatattgccgggcatgtcccgacctactttctttcttctcaatcaataaaaaaccgtgtcccttcatccaccaacgaagaaacacggccgaaagttattaagaaaattctgaatctacaagaaagtggacaaaaacatgtctgtcctgctatcaataagtaagacgtataccggcctgcaacgtaaagttacacgggttctccttgcgtatagtctgtatcgacgaaccgtcatcaaagaaataagatactcccggttccacatacaggcccaccctattgcttatgttatactgggcaccgacagcacccatgacagaaagctgtaccggtttcacagtctcactctcagtaccaatcttgccatacacacatttttcaatggcaccccccgccgaaacgtacatcgtaaagttctttgcatccacaaagttccagttggcccgtaccggaatgccaatataatgcagcttctggcttatcttttccgagctgccctcataccttacgtcagaagcaagataggtatacgtcagcccgctttccacagagaaacccttcgccaagtttttccgcaccgaaacaccgaaactgagcggttgtttatggtctatatccgcaattttcttttcgcgtctttgcagatagggcataccatccttaaaaaccagttcctgcccgtcgggaatagtaacaatgccattggccgtagaggataaatctacgttaccgccataaataggacttccaggcatgtagtccgacatcacattcgcttccccttcattcgccaatgaaaaacctcccgtatttcctacggacaagccaaccgcccatcctttagtatccctaccagaactgtttctttccggaagatgcagtttgtcccggcctgacggacgatagcggtctttccttgttctctccggttcctctgcctgcattgcggtcgcatggtccgtatcttccattaccggctcttccgcctgctgcccaataccgacagcctcacctgcagtttcaaccggcaacatttcctcctgccgctcatcgtcaaccgatattctgatatgttgtgcaaccaaagggcgacttgcctccctattgggtgccgatgcatttccatgtgcccgataggcaggctctatgggattagtccgtacagcaggtaccgtctgttccggcaagacatccggagccacagccaaagcaggcactgacgtatgccgcatttcattccctaccggactctgcaacagccacagactgacggacgatactgccaccagcagcacagctgccgcagccaccgcccagcgacggaaaggcatcatcctatgcgatccggttatcggagttccggaaagggacaattccttttccaaccgctcccatccggcaaccggcaacggttcggaatagtcttccagcttgtcctttatctttttcaaccacaattcatcttccatacgttccttcatttaatcatttcttttcatccactcacgtacttttgccgctaaagtcgctttagcacgcgtcaactgcgaggcagaggatttttcattaattcccaatagtcgagcaatctccttatgggatttctcttcaaaaatatataagttgaatacggtacgatagccggcaggcagttcactgataaactgcatcagcaccttttgaggaatgacatctatcgacgaaccttccggttcctcataagcttcgggtgcattctccaaagccgatgactgattcatcacatcatttttccgcaaatactgcaataccgtattcaccattacgcgttccatccatgcccgcagagagccctctccccgccaagtgaacttatcgaaagaatcaaaaagtttcagaaaaccgtcatgcatcaggtcttgggcagtctcccggtcacctgcataacggaggcatacgctgagcatgcgtcccgcatagcgctcatacagttctttgcgggcaaggttgtccccttgcctacagcgttctgccaattcctgttcttccattctctcttttaacacgtgtttaccttaaaaatgcaactggcgcaaaaatactgcatcaggcagagaagaaaatcatactttcatttctttaacagtatactacgcagtatttagcttttcaccgcattttctgaatacaaaaataagttttaaacagaaaagagccaaaacctaccacttatgaagaaactgagaatgacattggcagcatccatgcttttattcctgactgccattgtattgcaatcatgcctggacgattgggatgacaaatatgacactttgttcgccgtaggtacggtgaaggtcatcgaaggaaaagactactatttctcactggacgaaggcagtaaactatatcccagtgacacaacctatgttcacgactatgccgtaacagacggccagagggctttcatctacttccgcgaactggaagagaaacttccaggctacgaatacaatgcccaaataaagcacatcgaaaatattctgaccaaagacatctactccatgcctgccgaaaaggcggacagtatcggagacgacaacatcaacgccacggatttatggattacgggtgagtatctgaacatcaagtatcaattctaccacagtaacaacgaagataagaagcacatgctgaacctggtcatcaacgaagcatccaccggcgagaacgacaaaccggattacgtcaatctcgaattccgccacaatgcctacaatgacagccagctcacactgggcaccggactggcctccttcaagctggacaatatagcggaacagctgaaagagaaaaaaggactgaacatccgcgtcaaaagtctatatgacggtgaacggttcatgaccatagacattaaaaaagaaaacaactaaatctcctgaaaacacatttttcaacatctcaatgagaagcggagtaacatttcaatatgttgctccgctttgtttttccataacttatcagaattcattgttcaagcaagtcagcctcaacgaagcgttgaacgcttcggcagacaatcgcgtcctgacctgtacctgcacgctgctcttcggctggacatcaaaataattgtcgctatatacactttcattgtcagcaacggacaagcatacggcacgggcaaacttgtctgttgataccgtcacttcatatccgccttcaatggaacggacttcggtctgcaaatccactttcggataattcatattcttctgcttgtccagacagtagttgttatggtacaccctgcccgatttgtccgtatagtctacgcggacatataccgttcctctatctgccccctccagcagcttggcaagcggtgcggaaaaacagacacggctgtcattaccggaaatgccgacagatttgtcccagtgataaaccacagtgccgtcgaaccggcagacctggagctgcagccggccggaagtattctccaagcggtcggacactgcatatactttcaaatcatccccctccactaccggagaaatcaggatgtcatcatagaccttgcgagtataatagtgctgcgccttccagcgtccgtaatagtcacggctcgcccaggaagctacgggccaacagtcgttgtgctgccagaaaagcgtccccatattatacggcatctggcggcggtgcgactcgatggccgtcttgatggcatctccctgcagcacatggttcatataaaggaatgcccggaaatcacgcggctttttatattcattcaataggtaagtctcaatcagcccgttggcatggtcgccaccacgctgatgggacatcatcacctcggaacgtatatcccagtcttcggggtaaggagcatagcgcttgacggagtcgaactctggaaaagactgaaagccgtactcgctgaaaaagcgggatttctcgctgtcataatcggaaatgggtgctttaccatgccagacactccaatagtgacggtccccgtcagtagtaccggacatctctccctcgaatgcgaacggagaagaaggccaatagaaggttccgggtgcatactccctgaccaccccgggtaaggtgacatgatactgctgccggtactgtgcccaaatcttgtcggcatattccttgttctgccgttctatctcgcacttccagccccagcccagccaggcatcctggcattcattgtttccacaccacaaagcaatgcaggcatgattgcgcaaacgtttcacattgtccaccgcctcctgatggatattatcgagcagggcgccttctgccggatacatgctgcaggcaaacataaagtcctgccaaatcataattccatgctcatcacacaaatcatagaagacatcgttctcatagatacctccgccccagacgcgcaacatattcatgtttacaccggcggcatcgagaatcgtccttttataattctcgggagtgacgcgcggcaggaagttatccgaagggatgtaattggctcctttggcaaaaaccggacgcccgttcagctctatatagaaagtatgcccgtccttatccggctgatgcaccaccttcaaagagcgtatgcccaccctttcggttttagagtccaacaattccccacctgcaatgatatccgtacggaaacgataaaggaaaggctcccccagtccattactccaccacagcttcggcttgtgaaggacaaaatcaacggtcacctgattggtgcctcgcttcaaatccgcttgccactcgccaagcactcttccagtaacctcatccgttatcgtgaccaacactccattcatatccttatcggcatccagctccacatgtccggcaatcacggccctgcctgcaccgacttccttctgctcgataaacacatcgttgattctcaaatcgctccaagccctgatatacaccggacgccagatgccggaggtaaccagacgtgggccccagtcccagccataatgataacccgccttacgggcaaaaatgcttatcttcttgttgaacaagcccccgttttcagactggtcattggatgccggatactggtagggaagtgcatcccatttggggacgtctatctttaccggcgaatggaagtacaccttcaatatattattctcctccctgatgtactgcctaacggggatagaccagcggcgaaacatattgtccgctttcagcatacattcatcattcaaataaacgtcagcgtaagtatccagcccctcgaacacaagctccatattctctttccgcatcatgtcggcagcaagagtaaagcaagtttcataaacccagtcttccttgtcaatccattgcaatccccgttcgttcaaccggaaaaacgggtcttcaataatcttgttctgcagtaagtccgtgtggactactcccggaactgtagccggataccaattggtcagtctcgcctgccggaatttccagccttcatgaaggttctttaccgctgtttttagtttcatacgagtgtgtttcatagttttctttgactactctaaattacggatagacaaaaatacgacattcaaaggatactttataatatcttcttaacgaaacatgatacaatcccgtacacacctaccgggtcagcgtcgctgcacatctgctgcagtgtgactgcaaacgtgttgcagcgccactgcaaagctgaatgcagtagcactgcaaaaagcatgcacttgctttgcagtggcaatgcattatcccatcgccttattatgaaaggagatgtcatccaactttcattatctataattaatttacaaagacatagtttccaagtctttcaaagcaaacggagtacaagcaaaaaaggtctacaaatctatgatttgtagacctttacccgctagttttccatcttattcagaactgttgcggagagagggggattcgaacccccgataccctttaggggtatacacgctttccaggcgtgcctcttcaaccactcgagcacctctccttgttcggggcgcaaaagtaagggaagtttttggaattaccaaatgttcgggcaaataatattaaaagtccgttcaagcaaccaatgccggaacggactttcaacactcaataaaacatacttatcattaccgtgatctgacttcccgtctcataaatatgacatacgaaagagcaaaacagatgacagtagctgcaatcagtccggtgagctgcggccacaccaccaaaagactctgtcccaatggcagcggactgggaatggccccctgaacctgctccatagtaagcggccccaaacttctgacggaaggcatcagcagcgttgtggtcgcctcattgaacagttcactaggtgccagacgcatcagaccgagaataaatttctggtaactgactatctgataaggagatgccagctgcgaagggctcaatgccttggcaaccagattgacaatcatcgtatagaacacgctgaaaaacaaccataccgccaccgaagccaatgccgaggtggccgcctgacggaagcaaagcgaaaacagaatggccagattcagccagaatgccacatagaacacactgattatgagaaagaatacaatcctccaaaattcttctgctgtgggaggaatgcctatcgctatcaacccgcagcccattacgaggaatcccagtacaaacagcatgatacctatcacaatcaatgcagccacgaacttggcattgataatgcaatcacgatgaacaggctgtgacagcatacggctcaacgtccccttgttctgttccgaatttatagcatcgaatcccagcgcaatccccaacaacggccccagaaagttgataaactgcacaaaagaaggcaatgtgccatccgaggctgtgaataacttcaagaaaaggaacgaaccgtccgggtcattgggcttgatggcggcacctatgttggtaagcgaggtatagagtgagcccatgcacgtaagcaaaatgattcccatcaagataatgaaccgccaacttttcacatggtcggatatttccttgttgacgactacccgaaaaggataattgactttattcatgcctttctcctccttcctccatataatggttataaatatcagacaattcctgatgcttgtccttcaaatcagacatatcaatcaaggtgaccagcttcccactgttgaacagtcccacgcggtcgcaaactttctgcacctggtccaggtggtgggaagagaacaagacggtcagtccctccttccggctcaactgcctaatgagctcgatgaactcctgaacaccggcagggtctattcccgaagtaggttcatccaggattataatttccggatttttgataagcacgtctgccagccccaatcgctggcgcataccgcgcgaatatttcccggtcttctttttcatctgtccggcaagccccacatgctccatcagctccagcgccttgactttcgcttcggcatccgaaatgccattgagacgcgcagtatatataaggttttccggaccggtcatgtcatcataaaaccccacatcttcgggcagatagcctattttccgctttacctcgataggatgcctggtagagtcgataccgcaaatctccacagagccggaagtgggttccgtcagtcccagcatcatcaggatggtagttgacttgccggcgccgtttggccccaataatccgaaaatctcccctttacggatagtcaggcaaatgcggtctacggcagtgaagcgcccatactgcttggtcaagtctgtcaatgcaatcactcgctcgtccatgctcacctccttccatatttacggaacagatagcatacggcacctatggcaacgattattatcaaaacgcccacccatccccatatcatcggggttttcacggcaatgcgaaattgggcgtctgtattcacttcaggagttttggccgtcatggtagccacataatctccgggcaatgcctttttggatgctttcatggtagctacgacattggccgtttcccccgccttcagcatatcaatcttcgaaggctcaaaagacacttcccagtccacgggcttattggcagaaagctggatatctttcaacaatgaagaaccggtattccggaccaccaactcgatacgcttcacatctcctgctgtgatttcggtactcaacaatcctctgggcgtggacaattccatctcgtaggaacccgtgacaacaacttccagctccaagtcggcagaagtcgtaccagtagccgcacgtaccggaatcttgtaattgccggcttccacattggcgggagggacaatctctatactcacattctggctgctgttcgcttccacctgggcagaagtggcctgcttatagttaggcttgaatacgacactccagcctctgggggcattggccatcagcgcatacagctgctggtcggccgtctggtttttcaaagtggcattgaaggtaaaggtggacttggaattgccctgcatattgggctggtcggtagtgaactcggtctggtaagttcctttctgggccacgatcacctccagcggcagtttggtttctccggcaaatactgtgaaatgataacttcctttatttacttttagaggaacttccactttcaaattgaacgttttcttttccttggacagtacagaaagctggctgagggtccagccgcctgacttgatttcatgcttccaactgcccggcaatccgctgaccgagagatttgcatttgtaaccccgtccgtgttgttaatcaaatcaatgctgtaatcaatggacgctccgggcgtcacggaaatttttgtgtaaggagtgtacagaattatgcttccagattcatcggcatgtacacgatttaagggaaaggctcccaacaaaataactaacaataaaatacaatttgttctcatagtcataaaaaagttcttatggttgtttaattatccttaattccgcaacactattacaaatataactttttaagtacctgagcaacaaaaagttgctcaggaatttgccatgtcagatttttcacctatcttagtgttgcaaatcaaaatatgtatcaaacccgacagacatggcaaaggtagcaattaaatccgagaaactcactccttttggaggaatattttcaataatggagcaatttgactccagactctcatctgtaatcgactcaaccctcggtatgagatgcaggctgtatggttatcaatacagcgaaatcatccgttcgcttatgagcgtttatttttgtggcggctcatgcatcgaggatgtcaccactcatctgatgtaccacctttcgcttcatccgacacttcgcacatgcagtgccgacacgattcttagagccataaaggaactgacccaggataacatttcctacacatccgacactggcaagacctacgacttcaacacggcagacaagctgaatacactgctcctcaattgcctattgtccacagggcagctgaaagagggcgaggggtatgacgttgacttcgaccaccagttcatagaggctgagaagtttgatgcgaagcctacatacaagaagttccttggttatcgccctggcgtggcggttattggcaacttgattgtcggcattgagaacagcgacggcaacacaaatgtccgtttccaccagaaggacacgctgaagaggttctttgaaaggtttgaacaaaacaagcttattatcaaccgtttcagagctgattgcggctcgtgttctgaagagatagtggaagagattgctaaacactgcaagaccttctatatccgtgctaaccgatgcagttcgctctacaatgacatctttgccctcagaggttggaagaaagtggaattgggcggcattgagtttgagctggcctccattctcatcgagaaatggaaagggaaggcataccgtcttgtgattcaaagacagaagcggatagacggcgaactcgacctgtgggaaggagaatacacctaccgctgcatccttacaaatgactacgagtcttccgagaaagagattgtcgaattctataacctccgtggagggaaggaacgcatcttcgatgatatgaataacggattcggctggaacaggcttccaaaatcctttatgggagaaaacacggtgtttcttctgcttatggcactcatacgcaacttctataaattcatcatggcgaggcttgacgtgaagaggttcggactcaaagcaacaagccgcatcaagacgtttgtctttaagttcatctctgtgccagccaaatgggtcaggacatcaaggaagtatgtgctgaatatctattcatgcaacaatgcttatgccaatgtgttccagaatgactttggataacaccgacaacttatagtcgtgattttgcgtattgcctcaagtcgcatggtggggtaaggggcatttatatgtctttatggtgacattcgatgcactgtgccccctttttactaacgatgcagattcttttcgcttctgtatcatattaggcgcgtagttgcggatttgaggattatgaatattttccaaatttgtgtgttgcaaaaataaaagatagctatattagtagctgttaaaagaaacaaaagaatataattgcggacacgatataccctgcgatgacctgcttttcttatctttgcgattcctattgatacaaacgaataccataccgacatgagaatccctgaaatacgcttacagaaccagcaactgtccactccactcttcggccacccgaaagaactggtctcctggatgggcgccatgcaggcacaagactatacaatggtgaaatgggccgtaggtatgcggctgaagtcaccgggaattcaagccgtggaaaaagccctgcatcaaggggaaatactgagaacccacgtaatgcgtcccacatggcacctggtagcagcagaagacattcgttggatgctgaaactctctgcacaacgcatcaaatctgccaatgattcttatgcaaaaggacatggtctggaaatcacggaacagcaatatgacagaagctacaccatacttgggaatatcctcagcgggaagcgaagcctgacgaaacaagagattgcggaacattttgaacgttcgggactgcttgcagacaactaccacatgacccgctttatgtcgcgtgccgaagtcgaaggaattgtgtgcagcggagaatgccatggacggcaacacacctatgcccttctggacgaaagagttccacctacccccgaactgacgaaagaagaagcgctggcccgcctggctacagcctatttccgcagccatgcccctgctaccctgcaagacttctcctggtggtctggtttgcctttaacggaagcaaggcaagccatttctctgatagaaccggaactgatgtccgaacaatggaacagccagacatggtacatccatgactcctgccggacatctggaaaggcgaccggtaacctgcaccttcttccctcctacgatgaatacctgataggatacaaggaccggacggacgtcctacccaaagaggactattccaaagctttcaccaacaacggattgttctttccggtacttctctataaggggcatgtagtaggaaattggaacaaggcgtccaagaaaaaagaaatcttcccggagcattcgcttttccggaaagacatctgcctgaaagaggagttgctgaaccaggctaaagaaaagtacgtccggttcctaacacattaaaggcggtcatcgaagattttcattgaagaatctctctattttgccgaatggaattacctctatattgtcatacaagtctacatggtttgcaccgggaataatcagcagttccttattatcaccctgcaactttttaaaagcatcttcactgaaataacgtgaatgggccttctcaccgtgcagcatcaacactgcactacggatttcatcactatatgaaaggataggcatattgatgaacgaaagcggtgaagtcttgttccatccgtggttagagttgagtgaccgcttatgatagccgcgcggtgttttataataggcatggtagtccttcacaaattgtggagcatcggcaggcaacgggtctactacacctcctccaagagcaaatgtaccgtttctataatcctccgtacgctgagcattaagctggcgccgcaattcatgccgtgcatcggcattcatagaatcgaaataaccgttagcattgacccggctcatgtcgtacatggttgccgtaactgtagccttgatgcgagtatcgatagccgctgcattaagcgccatgcctccccatccacaaataccgagaatgccgatgcgctctgcatctacatcgtcacgggtggaaagataatcgaccgctgcactgaaatcttccgtattgatgtccggcgaagccacataacggggctggccgctactttctcccgtataggatggatcgaaagcaatcgtcaggaatccacgttctgccaatgtctgcgcatacaagcccgaagcttgttccttcacggcaccaaatgggccactgatggcaatggcaggcaatttacccgtcacattcttgggtacatacaaatcggcggcaagtgtaatgccgtaacggttgtggaaagttatctttttatggtctactttatcactctgtgggaatgtcttgtcccactcttgagtcagattcaaattctcttccataaatttattatcattattaggatcattttctgttgcagacaaatgtcctgcagcacaaaggctaataaccatcgccgcacatatgttttttaccatgttcttcatctctacttctttaagtttcggttggaaattcatttcttaatccattgcttgacagtttcccggctcgctccattcagcagcctgccttttccccagtttatgccggggtaattcgtctgcaattccttttctgcattagaaatactgctgcttcccgaagtggcgaatggaataaccgttttacctgcaaaatcaccgctttctataaatgtattgatgattcttggagccaaattccaccaaataggaaaacctatataaatggtatcatactccgcgagacttcccaatttagaatacaatgcaggacgtgatttggaatccgacatctccacactgctgcgcgaagctttgtcgtgccagtccaaatcagcagccgtgtactttttcgcaggctgtatttcgtagagggtcccatcaacagcttctgccaccaacttggcagcccttgccgttgttcccgttgccgagaaataagctaccagtgtcttaccaccttttttctgtgcgttaacaataatagacaacagcataactgccatcataaacaataccaatcttttcatacgatatattatttagttgaaacatataaatccaattgttatagcgatacaaaagtagcgggtattattattacataggtatccagattactgattatataacccaaattactgatagatgtccgagaagaaaaataaaaaatcccgtaaaaccttgattttacgggatttgtcatactttgagtcctttttgtctttggagttctgcggagagacaggctctcgaacttatactttcacagaatatcataaaaccgcaaacaactgataatcaagtgtaaattacaacatagagtaaaactaaatgtttctaaatgtcttttgctatctcaataattgggtgtatatttgggtgtagaatttcaaacgcacccaattatgaatatcaagcgcaacatcatttttgcattggagagccggaaaaagaacggtgtgccaatcgtagagaacgtacccatccgtatgcgtgtcatctttgccagccaacgcatcgagtttacaacgggctaccggattgacgtagccaaatgggatgcaggcaagcagcgggtaaagaacggatgtaccaacaagctaaagcagagtgcagccgaaatcaatatggacttgctgaaatactatgcagaaatccagaatattttcaaggaatttgaggtgcaggaggtcatgccaacgacccaacagttgaaggaagctttcaacatgagaatgaaagacaccagcgaagaacagccggaagaagcccctgtcagcttttgggagatattcgatgagtttgtaaaagagtgcggtaaccagaataactggacggcatccacctatgagaaatttgcagcagtgaggaaccacctcaaagagttcaaggaggatgcaacgttcaactatttcgacgagtttggattgaacgaatacgtcaacttcctgcgtgataccaaggatatgagaaacagcaccatcggcaagcaaatgggattcctcaaatggttcttgcgctggagtttcaagaaaggacatcatcagaacattgcatacgatacattcaaaccgaaactgaaaaccacctcgaaaaaagtaatcttcctgacttgggatgaactgaacaagctgaaagactaccagatacccaaggataagcaatacctggaacgtgtgcgtgatgttttcctgttctgctgctttacgagtttgcggtattcggatgttcgcaatctgaaaagaagcgatgtgaagtctgaccacatcgaaataaccacagtcaagactgccgacagtctaacgattgaactgaacaaatacagcaaagccatactggacaaatacaaggacatccatttcgagaattacatggctctgcccgtcatcagcaaccagaagatgaacgattacctgaaagagctgggcgaactggcagaaatcaacgagcctgtacgggaaacctactacaagggaaatgaacgtattgatgaagtcacacccaagtacgcattattaagcacccatgccggaagaaggactttcatctgcaatgcgctggctctcggaatccctgcacaggtggttatgaaatggacgggacacagcgactacaaggctatgaaaccctacattgacatagcggatgatattaaggcaaacgccatgaacaaatttaatcaactataaaagtatcaaacagtttcatagatagttgccaatgactatatttgtagaaattatcatcacaatatgagcaacaaggaatccaacatagaaaaaacgaattttgatgcattcattcaagcggtcggttcagaaatagaacaggcacaagtaaggctgattgttgcagccaatgcacaaatgctgttccattactggaaggtaggcaattacatcctttatcaccagcagctgcacggatggggaagcaaaatcatcaagcagttggcaaaggctatccgactgcattaccctgaaaagaaaggctattcggaacgtaaccttacctatatgtgtcagtttgcaaaagcatatcctttaagagcgttgcaaagtttcatagaaacggatgcaagactgtctgtcccgaccatacagagtgtgaccaatgaagtattgaaactgaatgacaagcaatttacgcaggaacttactgcgcaaatacaatctattgattgtcagatattaacaattacacaggaggttcctgcgcaaattgaagatgtgggaaaaaccgtttctgccatttacaggatgggaatcagggaaatagaagaagttttcttgacctctcctatagccaaaataaactggacaagccaaatgactatacttgatagttcgctacctttaggtctaagctactggtacatgaagcagtccatagaaatgggatggagcagcaatgtattgaaattacagattgacagtgatttgtatagccgacaaatcagcaacaacaaggttaacaatttcacgaccacacttccggctccacaaagcgaccttgccaattatctactcaaagacccgtacatctttgatttggcaggagccaaagaaaaagcagacgaaagggatattgaagaacagctggtgaaacacgttacccgctacctgttggaaatgggcaacggttttgccttcgttgcccggcagaagcacttccaagtaggaaacagcgatttctttgccgacttgattctatattccattccgttgcacgcatatattgtcatagaattgaaagccactcctttcaagccggaatatgccggacaactcaacttttacatcaacgtggtggatgataagttgagaggggaacacgacaacaagaccatcggtcttttgttgtgcagagggaaggacgaagtggttgcccagtatgctctttccggctatgaccagcccatcggcatcagcgattaccaattgagcaaggcgattcccgagaaattgaaatcagcgttgcccagcgtggaagaagtggaagaagaactggcttctttccttgacaaagccccccaataataagagtatgccatgcagaaaacgataacaaccctcattcctcaatacggggagctgaacagaatctgcaaagactggattgtaagccatactttctcttttgaaaagcagaaattcaccgttgatttctactcggaatggaacgacataacagcttttgaacaagctatccttgaactggtacttcatacaccgccagagccatgtaccctactgctgaaaagcctgaaaaaggaagtcagagaatacacacggctttatgaagcttacagccttccccatgatgaggtgattatgcgtgtatgcaaccaatacgcagacagctacaaggaagccatcagggaagagatggaagtggtgaacaggctgcgcaaaccgatgaacgaagccaacaaccgctatgattccatcggctaccgagagcatacacccgaagaggaaaagctggcggaaagagaatatgagcgttgcaaggctgaatatgaaaaggagaaagcccagctggaccatctttatgagcagcaaacccttctccggaaagaagcccggcaatacatgaaaaaccattgcgatgacatctacctgcttagcgtacacttcatgggcatcctgaccaaatatgtaccggatgaagaaagcaagccgaacgaagcagacgagcagaaccgtacagacagccagccggaaactgatacggcaaccgcatcggctacggctacgactgccagattgcctgaatatttcagcatgaagctgctttccctcattcatgaagtttgtgcaggggaacagtttgaagacattaccgcaccggatttctatgcctgcatgaatctgcatccctgccagtacgtactgaaaataaagccaagggaaaagatacgggtatgctatctgatttccctgatgagggagcagttgccggggcaggataaggacaaatggaaggaagccatcctgaaacacctggatattgatgaagactattacaagtccaagtacagggaacccgtttccgatttacccagtattcccaaccaaaagttcgccaaggaaatggacggaatattccgataacccgtgatattccaatatattttacgacataaccacttataccactcaaaataatttttgagtggtatttttatttcttgatattcagcgatataacagaacaatccgtatctatcatccacatacttaccactcaaaaccctacctaattttgcatcgttcgagaacagaagaaacagcctgtgcgcagggctattgtcaaacaagtaatcatacggacgatgaacaacctcaaagaactgttaatgaaacccgtctggcagatgacaggcgaagagttcctttttctaagcagacacgcttcagtacaggcagaagtgcaaacccagccgaccaccgacacggaaagaaagtacgtgtacggcatactcggcatagccaagcttttcgggtgcagcctgcccacagccaaccgcatcaagaaaagcggaaagatagacaaagccattacccagattggacgcaagattatcgtggatgcggaactggcgctggaactggctggcaagaaaaccggaggacgcagataaaggaggtgattatggactatataaaagaaatatcacccgaacaagccgttatcctctggcaggaatcccggctaagtctgtcaagatgttacgagaaagcccccgaaattttgaaagtacacggttctgtcatcgggacgctgggcaatttcagcgcatccatcggcaaagccaagagcaagaagaccttcaacgtatcggctatcgtagccgctgcattgaagaacggtaccgtgttacgatatgcggctgaactgcccgaggaaaagcggaaagtgctttatatagatacggagcaaagcccctaccactgcctgaaagtgatgaagcggatcctgcggatggcaggattgcccgacgacagggacagcggttatctggagtttctcgctttgagaaaatacaccccggaacagcgcatcagcattgtagaacaggctatctaccactcaccggatattgggctggtcatcatagacggcatccgggatatggtgtacgacatcaacagccccggtgaatccacccgcatcatatccaagctgatgcagtggacggacgacaggcagattcatatccatacgatactgcatcagaacaagggggatgagaacgcaagagggcacatcggtacggaactgaacaacaaggcagaaacagtcctgctggtggaaaaggacaaggggaacagcgacatcagccatgtttccgccatgcacatccgggcgatggacttcgagccttttgcattccgcatcaacgacagagccctgcccgaacttgcggaaggttacaagccagaagcaaggaagccgggaagaccctcggtggaaaagtttgacccttacaaggatatttcagaaccgcagcaccgtgccgcactggaagccgcttttgcactgaaagaggaatacggctacaaggagctggaagataccttaatcaagacttatctggcagagggggttaggctgaatcaccagaatgcagtggcgcttatcaccatgctgcgcaacaaacggatgatagtgcaggaaaacggcaggaagtattccttcaagcccgattaccactattagccgacaatcccgaaaatcgcttcactttattcccgtatcctatatatacgacaatttagtgaagtgatttcagaaacagactaatcgcttcactttattccgggggtctatatattaggagtttagtgaagtgattgtactgaccgcatacttttaagagttgcgggcaaaaagagaaataatcaaagcactcactaaaaacgatttccttatgaacatcgagactgcaaaacaaatcaatctggctgactacctgcacagcctgggttattcacccgtcaaacagcagggtatcaacctttggtacaaatctcccttgagggaagaaacagaggcttccttcaaagtgaacaccgagcgcaaccagtggtacgacttcggtttagggaaagggggcggtatcattgaactggctgcacacctgtatgctaccgaccatgtaccttacctgctggagcggattgcggaacagacaccgcatgtacacccggtatctttctcttttggcaagcaggactctttcggtccgagcttccaacagctggagatagtaccgctatcgtctcctgccctgctttcctacttagaaggtagaggaatagatttggagctggcaaaaagagaatgtagtgaagcccgttacacccacaacggcaagcgttactttgccattgccttccctaacggttcgggtgggtttgaggttcgtaactcctatttcaagggctgcatcgcccccaaggaaatctcccacatcagacaggcgggaaaagcgaggaatacctgctatgtgttcgaggggttcatggactacctctcctttttgacattgagacaagagagctgcccgaattatccggaattggacgggcaggactacatcgtattgaactccgtatcgaatgtaaacaaggctctctatccgttgggcaattacgagcgcatccactgcttttttgacaacgaccatgcaggactggaagcactccggcaaatccgcatggaatacggcagagagcggtacatccgggacgcttcgcagatttacagaggatgcaaggacttgaacgaatacttacagaaacagattgaaagaaaaaggcagctccagtccgccaaaggggtgcgcagccaatcaccggaaaagaagaacggcttccagttatagcccactataactacacgcttcgctttcgtagttgtgggctctcccgaggggattagggctttgccctaatgacccactcagggcgtttcacccctgagaaccccgagcaaagagtgaccctctctttgcaatctccgcttatgggttacccctaagaacccctctgcgaaagcgagcaaagtaaatcaattgtaaacaaaggaaagaagctatggcaacaaaatcaagcatacatatcaagccttgcaacatcgcatcgagcgaggcacacaaccgaaggactgccgagtatatgcgtaatatcggggagtccagaatctatgtcgttcccgaactttccaccgataacgaacagtggataaatcccgacttcggcactcccgaactgcgaactcattatgacaatatcaagcaaatggtcaaggaaaagaccggacgtgccatgcaggaaaaggaaagggaacgcaagggaaagaatggaaagattatcaaggtggcgggatgctcacccatccgtgaaggagtattgcttatcagaccggacaccacactggctgatgtacgcaaattcggtgaagagtgccaaagacgctggggcatcactccgctacagattttcctgcataaagacgaagggcattggctgaacggtcagccggaagcagaagacaaggagagcttccaagtcggtaacagatggttcaaaccaaattatcatgctcatgtcgtattcgactggatgaaccatgaaactggaaagagccgaaagctcaatgacgaggatatggcaaccatgcagacccttgcttccgatattctcctgatggaacgtggacaggcaaaagctgtcacaggtaaagagcatctggaacgaaatgatttcatcattgagaagcagaaagccgaactgcaacgtatagaggaaaccaagcgacacaaggaacaacaagtaagccttgccgaacaggaactcaaacaggtaaaagcagagatacgcacggacaaactaaagaaaacagccaccaatgctgctaccgccatagcaagcggtgtaggttctcttttcggaagcggtaagctgaaagaactggaacatcacatcgagcagctacatcaggaaattaccaaacgggacaaagctactgatgaattaaaaattcagatacaacaaatacaggaacagcatagcagacaaattcgtaatcttcaaagaatacataatcaagaacttgaagccaaagacaaggaaatatcacgattgagcaccttgcttgaaaaagcccacaaatggtttcccatgttcaaagagatgttgagaatggaaaaattatgcgctgttatcgggtttaccaaagacatgatagaaaacctcttgacaaagaaagaatccatacaatgtagtggcaaaatttattccgaagaacacaggtggaaatttgacatcaagaatgatatttttagggttgagaaacatccgatggatagtggtaagcttatgctgaccataaaccgacaacccatagtacaatggtttaaggaacaatgggaaaagttacagcagaatctacgtaactcggtgcagagagagcaaaaatccagaggatttagaatatagaatagcctattattaataaaatcaagtatctatgcatccaaacagattgtttttattacagaatcaaaatcctaagaatttataaaaaatgaagcctaaagaagttttggaaaaatggatagattgctttaacaaagcagatgcttatcatatagcagagctgtatgctactaatgcagtaaatcatcaagtcgcaaacgaaccaataataggtaaagaatcaatctacaaaatgtttgtgaatgaatttgccactgctaaaatggtttgtatggtggaaaatatttttgaagatggcgaatgggctatcatggaatggaaagactctcttggacttcgtggatgcggattttttcatgtaaaagataacaaaatcgtctttcaaagagggtattgggataaactttcattcttgaagcaacacaatcttccaattgaataagtactatcagaatacggactgggaaattgaaatacccagtccgagttatataatgaattttacttgttaaactatttaaagtcagttggataacaaaccatacctttcacattctcagtagctccaggtattaattcagccaccatgcaatattcatgagagacttcgaaaggaaattcaattcctaaatcgatagccttgcgatagccaaatcgaggataatactctttatgccccaatacgactgctgtgccgtaacccaaaagtgctgccctctgatgggcttactgaatcaacatcccccccccaattcccttacgctggaattccggcaagactgccaatggagctacactcagggatgtgacagactgggtgtcactgtctatctttacttctgtaagtaagatataccagacaatttgtttttctgtcattttcttgttcttatctaattgttaggctcattgttgttatacattgtttaattatagataaatcgtgaatatccttctctcttaaatcgtagcccgaatggaatacttgttgcccttttgcagaaatgcaagggatgcttctgccttcaaagactgctgttccaaaatagtccggttgaaattcataccagcctccatccaagtcggcttgtttggaagtgccgtccgcattcaagacaaaaggatggatatcaatatagcctaattctttgctatacagttccacacgggtgggcaaccaatttgtttcaatttgatatcctctctcctgcaaaagatcaaggagttggtctgtataattggcatcaaaatcaatgtcaatatctctatgcaagcgggtttgctgtccgtacaagacatccactccccagcctccatccaaccaaaactgcatgtccaggctttccaacaagtccaaaacttgaaataactctgtaatcgtagtgtgttctttctttgtcatataataattctttaataaataatactatgcgtaattatccaactgcttgattgaagaaataaaatttgcacccactccaatcagaaagataacccatccgctgatcataaagacggatgtgataccccatgcttccacccaatatcctgaagctacgatacccagcattgatggaaaggtactcaaactaaagatgagagaaaaagtccgtccaagcatgtccgaagccaagttctgctgaataatagcgatgaaaagcgcatggtaaatggaataggctatgcctcctgtaaatgttaggcaaacaaaacctataaatgcgcttgatggtaaataactggcgctaatcagatacaatcccaatatcacataagccgtatgcatcactaatgtttgcttgcttttcaaagccttacaggcaagtactaaaccgcccaacaatgcccctgagccccaacccatttccacaactcccatttgcaaaatgtttccgttgaaatgcagaagcgtcataaaaggaaataacgtaaaaacaggcataaggacaaaagtcaccagcgtaaagcatacgaataaaggcaaaatgcccattgtacgccgcaaggtatgccaacattccgtcagttcttttttgaaatctggaagaactttcgttttttgaagagaaggaatctggacacaaagtaaggtcagacaagcagcaacagctccgatcacatctatgagcagaatatactgtatgggaagccaaacaacgaggcttgcccctacaacgggagctatcacctcactgaaggattgaatggaatggtacaaacctgataccctgacaagatggtgcttgggaaccagtagagggatgcttgcctgtaaagcaggtgcatgaaacgtactgcctattgaacgacaagcagtcaatagataaaaaaaagaaaggtctttataacccttggttatcacaataaaaagacatagggtacagaacgcgatgaacaagtccgaataaaacatcgttttctttcgattccatctgtcaacatagaccccggcaaacaagcctaatacaaattgtggtaaaaatccagctaaaatagccagagataaagctgtcggggatttaaattcgttgctaatccaaaaaataatggagaagccaacaatcgtacttgttaaaatagatatgagttggcctattcctatcacggccaaagttgatttccaatgattcattgtgctaatatttcatgcgtttatagataagtactttcgtacattaagcaaaacgaaattctatccacacaaaaaacttgtattataatccactcctgacgttggaatacaataacaaatactttcaggacgatgtaaagtcctgaaaaatcaaactgaatggatagataaatattagtcttttctcatcggattcttttaatatcgctactcttttattatgtagtggttgtattatcttaaataaaacaaaaacaccgactttacattcttgggtgtaaaactgggtgtttgttttgcaatctgctgattttcagcgtttgttgcggagagacagggattcgaaccccgggtgcctcgcagcacaacggttttcaagaccgccgcaatcgaccactctgccacctctcctaaaacttccttttcgggaagtgctttcctctttaaagcggtgcaaaggtacaaatcatttttaattctgcaaacttcctttctcttttttcatgaattaatagtacttttgcaccatgatatatccgcagaactttgaacagaaaataggtttcgaccaaatacgccgattgctgaaagaaaaatgcctcagtacacttggtgaagaacgggtgatggacatggcattctccgaccactttggagaggtggaggagcgtctggaccaagtcaccgaatttgtacgcatactccaagaagaagacaacttcccggcacaatacttttttgatgtacgtccgtcactgaaacgcatacgcgtggaaggcatgtatctggacgagccagaacttttcgacctgcgccgttcgctggaaaccatacgcgatatagtacgcttcctacagaaaagcgacgatgatgaggaagaaggcgcttccccctacccttgcctgaaaaagctggcgagagacatcaccgtcttcccgcagctcatagcgaaaataaacggcatcctctctccttacggaaaaatcaaggacaacgcctccgcagaactggcacgcatccgtcgggaactggcaagtaccatgggaagcatctcccgctcactgaacagtattctacgaagtgcccagtccgagggtgttgtggacaaagacgtaacgcccaccatgcgtgacggtcgtctggtcattcccgtcgcaccggcactgaaacggaaaatacgcggtattgtacacgacgagtcggccagtggtaaaaccgtattcatcgagcctgccgaagtagtggaagccaacaatcgcatacgggagctggaaggtgacgaacgcagagaaattatccgcattctgacggacttctccaaccagctgcgtccctccatccccgacgtactgctgtcatacgagttccttgccgaaatagacttcatacgtgccaaagcattgtttgccgagcagatatccggactgaaaccggctcttgaaaacaaacagctattggattggacaatggcggtacacccgctcctgcaactttctcttgccaagcacggcaaaaaggtagtaccgcttgacatcgaactgaatgaaaagcaacgtatcctaatcatctccggtccgaatgcaggcggtaagtcagtctgcctaaagacagtgggcttattgcaatacatgctgcaatccggactactcatcccgatgcacgaacgcagtcatgccggaatattcagcagcatattcattgacatcggtgacgagcagtccattgaagatgatttgagtacctactcctcccaccttacgaacatgaaaatcatgatgaaaaactgcaatgaacggagcctcatcctgattgatgaattcggtggtggaacagaaccccagataggaggcgccatcgccgaagccgtattgaaacgcttcaaccaaaaacagacgttcggtgtcatcaccacacactatcagaatctgaaacattttgccgaagaccacgaaggtgtagtaaacggcgccatgctctatgaccgccatctgatgcaagcactgttccagttgcagataggcaatcctggcagttcgttcgctgtagagattgcccgcaaaataggtctgccggaagatgtcatcgccgatgcctcggaaattgtgggcagcgaatacatcaatgctgataagtacctgcaagacattgtgcgcgacaaacgctattgggaaggcaaacgccagacaatacgccagcgtgaaaagcacatggaagagactatcgagcgctatcaaaccgaaatcgaagatttgcagaaatcccggaaggagattctgcgcaaagcgaaggaagaagtggagcaactgatgcaggaagccaatgcacgcatcgagaacaccatacgctccatcaaagaagcccaagcagaaaaagaaaaaacacgccaggcccgccaggagttgacggacttccgtgaatcaatggaagcgcttgccaacaaggaactggaagaaaaaatcgcccgcaaaatggaaaagctgaaagagaagcagaaccggaaaaaggaaaagaaagcggacaaaggaaaagagaacggactgtctgcccaggctttggcagaacagcaggcgcggaaagaggcagaacgccttgcagccatcacccccggctgcaacgtcagaataaagggccaaacctctgtgggcgaagtaatggaagtgaatggcaagaatgcggtcatcgcgttcggcagcatcaagactaccgtaaagctggacaggctggaacgtaccaacgcgcagcctaaacaagctgatgtgtccaccaaaagcactttcatcagcgcccagacccaggacagcatgtacgagaagaaactgcatttcaaacaagacattgatgtccgcggcatgcgtggcgacgaagccttgcaagccgttacctatttcattgatgacgccatccttgtcggcatgtcacgcgtgcgtatccttcacggaacgggaacaggcatcctgcgcatgcttatccgtcaatatctggaaactgtccccggagtgcgccactttgccgacgaacatatacagttcggcggagcaggcatcaccgttgtggacttgagttaatggataattgacagttgataattgatagttaaagctaaatcataaatctgaaatatatgaaatcaatcaaagaactctaccgtatcggtaccggtccatccagcagccacaccatgggaccgcgcaaggctgctcagatattcctggaaaggcatcccgaagcagccgcattccaagtaaccctatacggaagcctcgccgctaccggcaagggacacatgaccaatgttgccatcaccgagacactgcaacccgcagcaccggtagaaataatctgggaacccaaaatattcctgcccttccatcccaacggtatgaaattcgtctctttggacagcgaaggcaaggagaccgaccaatggaccgtattcagcgtcggcggcggtgccctggcagaagagaatgatggagcatcatccgtaaacaccccggatgtatacgaaatgaacagtatgaccgaaatactgcaatggtgtgaacgtaccggaaaaagttactgggagtacgtcaaggaatgcgaggaaagcgacatttgggattacctgcaggaggtatggaaaaccatgcaggctgccgtaaaacggggattggatagtgaaggagtcttgcccggccctctgaatctgcgccgaaaggcttctacctattatatacgtgccagtggctacaaggcttccctccagtcgcgcggactggtatttgcctatgccttggcagtaagtgaagaaaatgcgtcaggtggggtcattgtcactgcacctacctgcggttcgtgtggcattgtaccggcagtgctctatcatctgcaaaaaagccgggagttcagcgacacacgcatacttcgtgcccttgccacagctggactgataggaaacatcgtgaagaccaacgcttccatttcgggagcggaagccggatgccaggcagaggtgggtgtagcatgttccatggcatcagtcgcagccaaccaattgtttggaggcagtccggcacaaatagaatatgccgccgaaatgggattggagcatcatttgggtatgacctgcgacccagtttgcggactggtacaaatcccgtgcatcgaacgtaatgcctacgccgccgcacgcgccttggatgccaacctttactcctccttcaccgacggcatgcaccgcgtgtcattcgacaaagtggtggaagtcatgaaagaaaccggaaacgacctgccctccctctacaaagaaaccagcgaaggaggactggcgaaggattataagccgatgtagttaaggataagggattaaggattaagggattaagttttcaatatgattgcacaacactaatatccttaatcccttatccttaactcttctctaatcaagttttaccggccaatgcgtatcatccctattaccgctcacatcttttgtctgtagcaagccgccttcttccgaatagaacaattgatactctgcatttcccttttcaacttcaatgacaaactgcataggcactaccggatactccaaaagaacaatctcctctatcttccaaccggcatactcactggcgctgaaagaggtctgtactgttcccggaagattattccaaagcaattcggtttccgtcagttgccattccgcctgattattgaaccatacatccttttcctgcccatccactttacaatctgcaacgaaatagccccctttctgttcccattccacatggattgcggaagggtatttggacttcaatgcttgtgacattgcttcgggcactttgacatcatccttgtcgtcatcatcactgcatgcaccaagtgccaaggcggcgatgaacatcatcgccaacatttgaatcttcattctcatcatttctctataaagtttaggttaatagttactggagaatcaatcgtccatgctgacgaactttccctttttgttgaacttcaaagagtagtcattacccaattcaatttccacaccggtacgtccgcgttcgattttagtaataatctctctcgggaagttagccttcacatactcctttaccggaaccggaatcaatgcttcgggaacagcggacttcttgcaatccacttccaaccaatttcctttcttgtcgaagtctatttccgtacggtctgtcaacagcacttcatattttttagtctgcaatatttcactttcaatcttgatgtgtgaaatgtgtggtttcgagaaatactggttgataaagttgcgtgccgtcagcggaagctgcttggcatcctgagtgataacatcaccggcaaaggcaaactgaacagctacaagagccaacacaagaatagacaatactttcttcataatcgttattttttaatgttactaataaatttcatatcattcacactgcaaataacggtagagaattaggaaagatttgggaataaccgcagttaacgataaattttactttctttaaccagacggaaggtatgcataccgtcctgccattcatacgtgagcttcaatgaagacgacaacgcaatggaacgcgctatggcaagccccagtccggtggagtctttcttgccatccatgccatgatagaaacgccggaacaacttctctccatccaaaggaacatcacccgtattctttatgaccagcgaagttggagtggtaagtacctgcaactctccctcttccctattgtgcagcaacgaattcttcaccagattggaaaccagtatttgcgccagcgaatggttgcaacggataataaaaggctgctcctcccgttttcgtatcagtctcacctgcttatgttcatagatatccatcaggtcgggcaagagttcatccaatatctcatccaccgaaacatcttccatctcggtatactgcccgttctctatacgggaaagcaacagcagggacttgttcagttttacggcacgccccagcgtggcatatatctcgtccagctgctccatttgctgttccgtcatcccttcactctcagccagcagttccacttttcccctcacgatggcaagcggtgtctgcaactcatgcgaggcattctcgatgaactgcttctgctcctcgtatgccttgtagctgcggttgcccatatccaatgcagcatcgctcaactggcgaaactcccgtatcttcgtcgggttgtccaatggaggcacctccttgccgggctgaatgcagtgcagccagtcaagcaacctatgtaacggacggaacactcccttcagcaccaactggatgccgatggaagtacagatgagaaacagcaggaacagcgctcccagataccaaagcatagcctccaccatgtcatcccgctccaaaatggaaatcatcagtttcaactcataatattgcccgtcgggcatacggaaagcggtacacatgacacgtaccggttcgtcttcatcctccagttcgatataaaccgtagcatcatagaacacttgtctgtaatgccgcccttcctcttcggatataggagtgaacttatagaaagacatcaacgagccttccgtttcgagtatcgaggggtcgtgaagcgcactctccatcaatatctcaccgtaattctccaacgtatcgtccgtctcatccaccacctcgtcaatgattgcgtaatagaacagcacaccccacactgccatcaacagaaacagcagcaatgcaagtttgcggtaggtgtagctcagcagcttcatcgttcggagagtttgtagccgaatccatagacagcctttaattctatggtagcctcagcttgtttcaatttcttacgcagattcttcacttgcgagtagataaaatccaacgaatccgcctggtctatattgtctccccacaccgactcggcaaggctcattttattgatgacccggccggggttgactacaaaataataaagcaggtcgaactccttgcggttcagctgcaagggttttccgtttatctctacctgccgtttgtcggggtagagcaaaaggtttccaagggtgacggtcacatctcccttcgcctgccgccgacgtatcaatgacttgacacgtgcattgagttccgccagatggaaaggctttgtaaggtaatcgtcggctcccagttccagcccgtccaccttgtcgtccagcgagtctttggccgagataataagcacactgtcactgcggtgcagccgtttcagctcacgcagcaagtccagaccgctcccgccaggcaacatgatatccagcaaaatgcagtcgtaatcgtagtcattgattttatccaatgccgaaaaatagtcggcagcggtctctacaacaaacttttctttcaagagcgaagtgcggatggtttcccgcaaatcttgctcatcttctacaatcaggattttcataccggcaaagatggtctataaaactggaaacaatctggaaaactatccactaatcaatgctgtctgtctgatagtcctccatcagttcttcttttgccatggagattttcccgtcagccgtaatggtcagtctgatgggaacataaaggtcggattgcggatagcagacgctggccgcgtatatgattccttgcggagtggtcttgtcatagaccagcccctcaagaatagagtacttcatgaacttagcatccaccaacgaagcaaaattatctttggtgaacactttatccaccacctgcttcccgccgcacgtgatgcgcaaggtgatacggttatccacaaatttctccccctgctcgtttttcactatcggcagagattcatccggccggcgcactacagaagactgatactcttttcccttatacgtaaaggatgtttttacatcggacacctgcatgcgctgtgggccggcaatttctgtactatcctgcatcaatacctgcgtaccgtctttcttattcttgtcttgcgacgaacaagcagtgaagaagatgaccgatgcacacactaaaatatagactatattcttcatcgttctgttttttagtagttgaccggacaaaaatagtacaaattgaatgcaatagaaaatttattttcttttagattccatttttgcttttctatcctgcactttcttgctgtatgcagcatattgttcttccgtcataatcttctggagttgtgaatcataagcaatacgggcagtcttcatctcttcacgcttcttttccatctccgcttttttctgcgcgcgttgctcatccgtcaattgatggcgcttgccatctctcttatgatgcttgtgtgctttggcacgatgcatcggcatatctcccattttctcaaccaatgccagatttgcctccagcagttgttgtttctgcgtatcgttcaaggagtactctttcaccatccgttccgtcatgcgctcggcacggactttcggttcgggcattttatcactgtggcgggcatgttgtgccattgccatgccacccatcaggaaggcggccatccatatcagaactattcttttcatcatttttctctttttttaattaataccttatgttagttatacctattgtgttgcaacgtatctatgacaaaaacaaaagcgggaagtttaaccgcaacttcccgctttaacataataaatgaggttgaaaagaatattaaggttcgtccagatactgtacgataaggctcacctgcttcggcatgaatgtccgtgtccttacattgtacccggtatgcgccaaggcttcatacagttcatgattccgttttatccaccgcgtcagggtgcggatggcgcaacgtgcagtagcattggggcaatagaggcatgccaaatctttctttttataagtcgtgatacgaaagccattttctgtttccatagcagtttgtctgatttttaaatgattgatgtaaagatacgatattcaaaaggcgaagtcaagtatttcaaggagaatatgaacctttttctgagaaagttcatattctccttatttacagaatgtttatcctaacggattttctccctggtcgccatcggaaccgccgccatccggatttggtttggaactacccccaccagaaacggtgccgttgcccgaccaatccatcttctctacgctggcgcgggtcagcatgtccctaaagtagaagcccggggtgaagataatcttgcggcgataaatcgtgcttgccttcacatcttccagtttgtcctggctcttggcattgatgccgggacggaaacagccgaactcacccagctgtactgaaaatcccttgttgatatccatattcaaggtgtcgatcaatccgtccagcaccaacttcaccacaccgcgaggcgccatgcctatcttggaaacctcgtcgcataaatccttaaaacctaccacacccaaagttttcatctgcgccacgtacttttccgtttttgtctcgtcaaaaccgaatactctcttttttacttcataattcaaagccatagttttttaattttaagttgattaataaaagtcggtcttgttcgctcgtcagtctgcaaaaccagtttctttgtgaccacgatgcaaagatacaacgggcagaaaacggggtggtgctttaacggaggtttaaggaggttttcgtaggataaaaaaggatattggagaaaaagaaaggaactgatagacaatgactaagaaattttattccttaatcatacattgtttttatcctttacggcatctttaattgacagcgtaaaaaagttcaggttcttttctctctgaatttgcgcttgcaaactccaaactcttttttccgaaaaatggatagtggtagtttcgtgagccgacaggacatagggcaatgcaccttccacatgaaatacattgactttcatctgtctttatggggttctccgacgcaatggcacgtgtcgggcactcttcctgaataggacggcacgcctacgaccaacaattcattgcgtcccaatctcaaaccgggggattaaaacattactcgtaatgtcatgttggatattatcggcgtgcagctgcttgacgataccctgcacgatggctttggtagtaaatgtagcactgaaaaaaacagaatggactttatgtatctccataaatcttaatttatccgattaaatttctaataaccgtaaatttattggtatccgttcaaggtcaggcagaagaagtcactgtcatcatacggataatcgtattcgatggggagttcttctttctctattttcttgaatccggctttctcataaaacagatgtgctctgtccgtattcttgggggtgtcgagaatgatttgcctccagctttttcaatatgcggaataacagccctttatccatattgagctcacgggatatgtcctttgcatttcgattcggatgcaaatacacatcttgaattttacctctttctggcatacaccacactcggccccatcccatgcctcatcagcaccccttcttctataaacctgttcaaatcgacaaccgcctgcttataactacgtcctgccagccgtgcatactgggagcgattgatgcagggatactgctgcaaatactcatccagcaactgccagcgctgctccacgcccaacgcctcatcggcagacgaagcaggcgccgatgccgattgcggacaacgctccaactgcatcttacctttcaaatccttatagaactccctgcccagacggaaattcaacccgcgcaaagcgatggaggcagcacgaagctctttcttgtccgtcgcctggcgggtacaactcaaagagggggtgaagtaacccagttcgcccagctccaccgtccagccattggcaaggcagtcgcgcaactcgtccataaagcctgccatcgctccttccagcaggctgcggctgaggccggtgaaaagatgtacacgctcgataaattccttgcggtcgatggtgcccttggggacaaagcgggcataaagggattgttgctcgccggtctggcggacgtcgggtttctcgaaaaggtcgtaatacgcactcatatatattctgtttttaaatggtcctgcaattccgtcatttcttcttccacggcattaaggagaagaaatgctattctttaatcattccaccatggagaaaatatcattccaccacggaagaaaaatcgttccaccatggtagaacgattttttccacacgatggaacgatttaatagtagcatacaaatatactaatcgaaaggaggaaaaacaagaaaattcccataaaaaacatatctttacgctggaaatgaaacatataaaaaatacacaccaaactcactttagagtcatgaaccttaattccgcaacactattacaaatataactttttaagtacctgagcaacaaaaagttgctcaggaatttgccatgtcagatttttcacctatcttagtgttgcaaatcaaaatatgtatcaaacccgacagacatggcaaaggtagcaattaaatccgagaaactcactccttttggaggaatattttcaataatggagcaatttgactccagactctcatctgtaatcgactcaaccctcggtatgagatgcaggctgtatggttatcaatacagcgaaatcatccgttcgcttatgagcgtttatttttgtggcggctcatgcatcgaggatgtcaccactcatctgatgtaccacctttcgcttcatccgacacttcgcacatgcagtgccgacacgattcttagagccataaaggaactgacccaggataacatttcctacacatccgacactggcaagacctacgacttcaacacggcagacaagctgaatacactgctcctcaattgcctattgtccacagggcagctgaaagagggcgaggggtatgacgttgacttcgaccaccagttcatagaggctgagaagtttgatgcgaagcctacatacaagaagttccttggttatcgccctggcgtggcggttattggcaacttgattgtcggcattgagaacagcgacggcaacacaaatgtccgtttccaccagaaggacacgctgaagaggttctttgaaaggtttgaacaaaacaagcttattatcaaccgtttcagagctgattgcggctcgtgttctgaagagatagtggaagagattgctaaacactgcaagaccttctatatccgtgctaaccgatgcagttcgctctacaatgacatctttgccctcagaggttggaagaaagtggaattgggcggcattgagtttgagctggcctccattctcatcgagaaatggaaagggaaggcataccgtcttgtgattcaaagacagaagcggatagacggcgaactcgacctgtgggaaggagaatacacctaccgctgcatccttacaaatgactacgagtcttccgagaaagagattgtcgaattctataacctccgtggagggaaggaacgcatcttcgatgatatgaataacggattcggctggaacaggcttccaaaatcctttatgggagaaaacacggtgtttcttctgcttatggcactcatacgcaacttctataaattcatcatggcgaggcttgacgtgaagaggttcggactcaaagcaacaagccgcatcaagacgtttgtctttaagttcatctctgtgccagccaaatgggtcaggacatcaaggaagtatgtgctgaatatctattcatgcaacaatgcttatgccaatgtgttccagaatgactttggataacaccgacaacttatagtcgtgattttgcgtattgcctcaagtcgcatggtggggtaaggggcatttatatgtctttatggtgacattcgatgcactgtgccccctttttactaacgatgcagattcttttcgcttctgtatcatattaggcgcgtagttgcggatttgaggatgaagaaaatatatcccaaagaatggttagaactgcatccttacaagcagacaaacagcgttgaccagtactacgtcggcattgcaaacgaaatccacaaaaggctttattcttcaacgatagccgacgccttcgaagaagaggaaaacatacgctatacaagcctctgcctcgccgcatggtttgaggacgtcatctcccagaccggcatctggcaggcattcactgccgagtgccggaagcgatacggaacctatctgcccttctaccccatcaaaggcgattattttccggatgaaatcaatctggaggacatacgttttctgctttggcaccatatacaatatctatgccggggaataagcgccatcaaccccgagaatcccggaatagagcaaactgcacaagagatatacggactgcttgcagaggaatacgaaaccgctcccgaaaatgaaaggatgcaggaatttctataccactctgccatgggagaagaagacttcttccgctaccgggagatactggattggtttcactaccaatgctacttcaacatcgaaaatgtcgcccaataccgggacgaagctgaacggttgctggatgatgaaaagattactcccgaaatggcagagaccctcatatatgccacacgcacctcactgacgttcaaagggcgccgcaacctgctgtcgctgacctcaccggaatggctggctctcatcggaaaagcccatcccgaacatcagctttggggcaaggtgaaggcacgggaaaacagttgctatctgctggagaaagaagacgacgagtatctgtacgtcaaagatttgtgtagtgaggacgaaggcgaattcaagataaccaagaagtccttgaacctctcggctatccgtagcagagaagtagggaaaagcacccttatctgcgaactgatttattttggcaacgcatggtggcagtgcggcatgcttctcgaaaacaagtacgaccagaaaatagcggaatatgtggacgacttgacgaaacagaaagaaaagacgaatgaaaaggctacattccatgatttcataaaagcatccggcgggaaatcttttgtattctgccaatcgcaagaagaaatctctgattttctgctgaacaagatgggatacggcttgaaagaagacctggacataccacgcatacatacagaaaccggagccatgctgatggccaactcgcacaccggcctacatatccaattcaagctgtgcgaatgcatcaaatctccggacaacccctattataataaagaggaagcagagaaaaacgccattatgttcatcgtcaaccccgacgttatcccttaccaactgagttgcatcctgcaagacgaaggcatgcttccggatgcttatctgaacagtttgcaaggaaaagaatacggacaagagttcatacgcaagaatgcacacttcctgactgattatttccattatcggtgtcgggagaaagactttgattagttgaaaatggggggtaaataccacttttgacacatttccaactaccaattatcatagtgctttccagaacttctggaaatccttataccgtccgtagcacactaactggtcgccggcttgtatctggtcattttccggcagttcgttcagtacattgtgttccacatacgagatgcccaggcaattcttcaaagtctcggcacgtttcaaggcgagtatcttcaggccaaactccttatcgagattcaattcgttggcataatagccaatgaacttgtccggaacggtgaacttgactacataataatccggtgccacgcggaatgtctccatatcggcaccgaattccagcaactgtaccagtccgcgtgcggcatcctcctcgggagtaagaatgcgttccagctcaaaggcctcgagcacggaacggtggacagcgtcaatggcgcgggcatagatatgctgcaccttcttctgcttcagcaaagccactacacggatggatgcaccgaaattctcgccgatggcaacaatcaccacatccacactgttcagcggcaacacggacaaggcctgctcgtccgtagcgtcgatgacaaaggctgtggcaatcttttccttcagactatccacccggccgacgctcacgtccgcacctatcacttcgtgccccagtgcagaaagctcttctgccagcacgtgaccataattccctaaaccgataataatatacttcatcttatttaattgattataatctgaccactcggatactgatacttcgtatgcttcttctgcttgatgatgccaagcatcagcgtaatcagtcccacacgccccacaaacatcagcagtgccaccagtagcttgctgtcgtctcccaaccgcggggtaaggttcaaactggaccccaccgtgctcaatgccgacacacactcgaaggtaatggccaaaagcgacgtacccggctccagaatgctgatgatgaaaataaacagcaacaagacgccgaacgacatcaccaccgtggcattggaacgacggatagaatcgtgtgacagctcacggccaaacacctctacccgttccgtgccgcgcaacacagccaccagattcagcaccactaccgcaaaggcatttaccttgataccgcctgccgtagactgtgaaccgcctcccacccacatcagaaacagatatataagcaatgtctgtacccccaagcctgccaagtccacactggtaaagcctgccgtacggggacacgtggcattgaaaaacgcctgcgtccacttgtctgccaccgacatgccggcgaaggaggcattccactcaaagacagcaatgcccaccgtgcccagtaccagcagcaggaaggtgactatcagtacaatctttgtattcaggttgtacagatggtaaaaacgcttgccgtcccaatgccacgtacgcagaaagtgccacagacgacgcagatggtaaagaataatatccttgaaattcaccagtatggggaaaccgataccccccaaaataatcagcagagatatatagatgaagaacggattgtgccccgtcatcaccaacggattacccagatttccgggcaacgtggagaatcccgcattgcagaaagcggaaatggcatgaaaagcggaaaaggccagctcttcttgaaggtccatccccatcgtcccgtggatgtctccccagatagcaagcatccctattccttcaatcaccagcgtaaaggccagaatatagaccagggtggagagcaaggaattcaaggaattggaactcaccatgtcgcgcaccaccaactgattgtacaacgaggtattacccatgaagaacatggcaaagaagctcgtcagtgtcatcactcccagaccgcctatctgaatcagcagaatgattaccacaaaaccggtcggggtaaaagtggacgccacatcgacagacgtcagccccgtgacgcacaccgcactggtggatatgaacagcgagtcgacccacgatatgccgttcaccgtgcaacgcggcaacatcaacagccccgtgcctatcattatgattatcaagaaacttgcagccagaataagcgaagggttcgtacgccgccccagcaaccgtaccagcccgttggaaaggctgaaaaaggaaaacaccagcagcagaataaggtgataggccttgccatgcagaaattcccagaactgcaagatggcgccctcctcctccggacgatggaaaatgaccgggataagagtcagatagagcagaatggtcagtatccaggtgagcttactgaacgtgcgacgggtatccttatattccagcaaaatgcgcagagtgacgtctgccaggaaaacaacccacaccccatggtacaagcgttggagctgatgcgcctcgacctctgaaatcgtaaagccatgctcatagaccacgccgacaatcagcaggatggaggccaaataagtgatggaagtcattactcccactgtcatccgtacgtaagggtgaatccatttattttgatacaaaaggaatttatgataaatcttcataaatgcatcgattaatgaaacgcggcaaacttagacaaatataccttgatatacaaaaaacaaaaggaaaaagaaattggttcaaaaataatagctacatttgggcattgaattattaataattttaaccactatgagcaacaaaaagaaaagattcattctcccggaagaggaaatcccacagtactggtataacatacaagccgatatggtgaacaagcccatgccaccgcttcaccccggcaccaagcaaccgctgaaagcagaagacttgtatcctatctttgccgaggaactctgccgccaggaactgaatcagaccgacacgtggattgaaatccccgaagaggtccgcgaaatgtacaaatactaccgcagcactccgctggtgcgcgcttatggattggagaaagcgctcggcacaccggcacatatctacttcaagaacgagagcgtcagcccgatgggctcgcacaagctgaactccgccatcccgcaggcatactattgcaagcaggagggagtgactaacgtgaccaccgaaaccggtgccggacaatggggagcttccctggcatatgccgcccgcctcttcggactggaagccgctgtctatcaggtaaaaatcagttacgagcaaaagccctaccgccgcagcatcatgcagacattcggtgcgcaggttaccccgtctccctccatgtctacccgcgccggaaaagatatactgaccgcccatcccaactatcagggctcgctgggaacagccatttccgaagctatagagctggcacagaccactcccaactgcaaatataccctcggctccgtattgagccacgtggccctgcaccagaccgtcatcggactggaagccgaaaagcagatggaaatggcgggtgaatatcccgacaccgtcatcgcctgcttcggaggaggttccaactttggcggtatcgccttccccttcatgcgccacaacatcctcgaaggaaagaaaacacgctttgtcgccgccgaacctgcctcatgtccgaagctgacacgcggcaaattccaatacgacttcggcgacgaggccggatacactccgttgctgcccatgtttacactgggacacaactttgcccctgccaatatccatgccggcggcctacgctatcacggtgcaggtgtcatcgtatcacaactgctgaaggacggttatatggaagcggtggacatcaagcagctcgaatcattcgacgccggttgtctgtttgcgcaagcagagggcatcatccccgcccccgagtcctgccatgccattgccgccaccatccgcgaagcaaacaaatgcaaggaaacgggtgaagagaaggtgattctgttcaacctttccggtcacggacttatcgacatggcatcctacgacaagtatttgtccggcgatttagtgaattacgagctgacggatgccgacatccagaagaatctggacgagataggcaatctggcttaatagatattcgccatactgacaagcggttcatagagtttctctatgtcctgcgagtccatctcaatctgtacctggtcccccggaatcaaacgagttcccgtggggaccagattttttccatcccgatgtacattgatgatggcgcaacgttccggcagggacagttcgtccaccagtttcccgtccagataagaatccgtcataatctccactgaaagcgtatagcgtttctcttctttaaaatcgggagcatgaatcatatcttcatagagggagacgttggaaggcttcatttgcagaagttccgtaaaatagtaggtcaacccaccaacaaccaccgaagggtaaaagacctcgaaatgccccgtaatctccgtaatcagcacaatggccgtgagcggtgtacggaccacggccaccagaaaagccgacatggaaacaagcatgacataactgacattctcttgcccgatgacaccgtacctcactcctaccagaccgacaatctgtcccaacaaccctcccgtaaccagcgtcggaatgaaactgccgcccggcaatccggaagagacagagaaaactgaaaagacaaaatgcagcaacatgacggccgtcacccacataatctgcgtactgccgttctgtgcctgggccagcagaaactgctccccgcctccagtcagattgacctgcatcagcgaaatgatgtaggccaccagcaccagatagaacatcttgacatacgccggagaattgactttggcatacacatgcctgaaagcattcatggtggaggagtagaacttcccgcatacggagacaatcaccgccaatatcaagaaatacttcatctggacaaagaaggcgaaaaccggttccgttacttctatcagatggtaaggattcacaggaaagaccatgcttgccacggctcctgccacaacacccgccagcaaggtagtgatggccgtcttaggggcatcgaagcgttcaatggattctattacaatgagcgaggaagccagtggcgctgcaaaagccgcagcgagccccgctcccgccccggctgccagcaactgtttctgttcgcctttcaggatatgagtccagcgggataccaggctacccacataagagcctatctgcacggaaggcccttcgcgccccaaagacagccccgccgagaaggacagaatgccccctacaaacttggataccatctcgatgaaaggatgccggtaagtgatgcgcccgttaatcacgccgcgtgtctgcggaatacctcccccaccgataagcggcattttccccacgagccacatgacgaagacgagaatgccccaagaaaacagaaagagtggaatgtgccagtaccaggccggatgcgaagcgaagaaaccactgcggaggtggaacagataatagagaagatagtgatagggtacagcgaccagtcccgtcagcaaaccgacgaacatgctgacgaaatacaaccgggcatccaccagcttcaacttccagatgtgccagccgcgtactgttttccagttcttgaccctcgtccaaagacgttctgccttatcccatagttccataacaaaacaactcccgttaacttgcgctttacaacaacaagcaacgggagttgttttatacagaaacattatttaccaaaatctgttctttgcaggattatactcaaatcccacgagcttcaattttcgtacaatgtcctctttctctacgttcatatcctcgcagagcgcgtccagcgaaggatagaaatcacgcagtttcatgttgatgaagctgtacagcatcaccgggtcctcaggtaatctcatagttacaatctttaaatttaaactaataccgggggcaaaattacaataaaaaaacaaaatagagataattttagtgtagaatatacaacctacccgccgcaaacgattgagggccatgtttacggagctttcgtctgctctatcttcaaggagaccttctcgataatcttgccaagctcctcttccagcggaatcacattaaagtcgccccagaaatcggcatcatacttgaagtcggtttcagagaagacggtatgcaccggcaaccgttccgcacgcgggaagcgcgtcacgttctccccgtcaatccggcaggtcaccatctcgaaccaggtatacagagtgggattactgaagagcatgcgttttctcttcatcttgaagtaaaggtcgccacggatgtggtggacataataggtaccgttccagggtttgtatgagacggtatagacaagtttctccgttgtcagcctgattttcggagcctggcgtatcacgaaaagccgtgtggcggccttcacataccggggatgaatttcgaagcgggcacgcagcaaggcgctgttctccgagtctatatagagttctccgcagaacaaaggctcctttaccccacgtttctgctcaaaatagacgacgttggcagtacggtcgtccaccgatacgatgtcgcccgaagtataggtataaagttcctcgccggattccagcaagaggaagtctggaagattcttcatgatgtccaactgcagacatgcctccaccccggagctgattttggcaagcacactgtccgtctgctcccggttatctatcttgctcatcttgagcagtttcacctggtctttctgtccgggttccatcgtcggtgatttgtagaccttgaaaacggcctccgtcaggctctggaacttgttcttcagttgtacaccttcccggtagaaggtggtcagatagaccggagaagtggagcagttcctatcccggtgctctatcatctcgcgaagcagctttttaggctccaccaagcggataagcacttcttgcaaggaaatgactttcggctcaaggctcaggacattgctgcgtccttccaaagcagaggcttccaccgtttgccccacataacccagatgggagaaggagagcatgcagcgcctcaacgagtcgggcaggttgagccggaattcaccgttctggttggtaatgttacccagtgaggttccttgtgcgatgaccgacgcactgacgacgggctctcccgtctccttgtccagcaggattccggcaatggtggaatatgccggtcggggcggcaggggtaccgtttcttccatactcttcctttctgccgcccgtgttatcaatatatggttgcctaataccttcaattcgaggttccggctgccggttatcctatgaatggcctgcctcacggaacactcctgcttcctgaccctcaccactgagtcgttatggatgaccttactatcatagataaacagatagccggactgctccgagactttccccaacagcgcataaaccgttcccttcattccaggcagccggacgatgcggtccagcacatcgcctccgtccgctcttgcactgcctgccaggaagaaaatgaagagtggcaaatggagaatgaagcatttcattgaattcattgttccgacaatatcagtctattgccctgacgtgtacacttcaagtcgaacgtccagcatatcagctcggccacagactccggggagttattcgaaaattcgaccgtcagccgccgtttgcccagggttggcgacgcggcttctatctgccagccggcagactccttattgatggcacgcagcacatcctccaggcactcgtccttgaaacggatgttgctggtgtagcggtcaaagagctccggattctccgtctcgctgacgagcagactgcccccctgcaagataaccgtttctcccgcctctacaaagaccgtctgttcctcttgtttcagcagcaccttcaccttcccgcgcttcacggacaagctgaaggggaccccttcattgctcctgacattgaaagccgtgcccagtacctccacacgcactctcgccgtctcaatcgtaaaagcctgctcgggtttctttgccacatcaaagaaggcttcgccctgcaggttcacttcccgcttgtcttccgcaaaatgttcgggatacttcagcgtgctttcctgcgccagatataccaccgaaccgtcttcaagggtcttgaccagtgtgggcttctcccggttctcctccgtcagcaagctacgactgtccccaccttgttccggtacggcccaccatgcggcaaaacatacgattccggcaatcacggctgccgaaacgctcccccacttgaggtaaagcctgcggtgcgttgccgaagcgtgttccgcatctgccggcagcaggcagtccgtttcgaagcgggcataaagccgtacccatgcctcgtcggtccttgtcttctttttatctacttccatcattgtgtccggatataattatcaatttcatttcgtaaggttcggagtaccttggtcatttccgcttccaccgtcttgacggacaacgaaagcgacaaggcaatctctgcatatttcttcccctccatgcggtgcatcctgaaaatctgctgccggcgccggggctgcttgtcgagcgtatgccggatgagggtctggagttcctcgtactccaaatgcgcgtgggggtcggacgaatagcccggcccggactccgtacggacagatgcccgatagcgctccttgacctcctgatgctcacaaaactgcacggcttcattcctcacagaacggtagagatagcttttcacggactggaatacttgtaaccgctcccgattcttccacagcacgtagaacagctcctccacaatttcctcggcggacgccgtatcacccgtgatgcccgcagcataccagcaaaggggggaataataccggcggaagattccttcgaacgcctttatatcgccctcctttattctggccagtatcatcagttcattcagcatactatgttgaggtacagcttatcttctacaaagataaagaaaactatcagataatcaattggattgcttccgcaatttgcagactgcattctccagggattccgtaggttctatgatattgtagttcctccagaagtcttcgttccagtactcatccaccaggtcgtagaatacctgcttccgtttgaaggtgttcttgttggagatgccggagagagggctttccgtcctgtcggtcaccaccatttcagagaaagcggtgtagctggaggagaacagcctttttttccagtcgcatttaaagcggatgacattccgtatatagttcaggtaagtcttggccccctgctgcttgtaggtcaccagataggtgacttcctgcgggcggaaccgtaagccgacgggcttcttatgcagaatggcctccactgccttcacccgatttgccatgtccaggccaaactcggcacgtgtaaaggaaagccgttcgtagtctatatacagtttcccgatgaacaaggcatacatcaggctgacccgcggacggaagctgaccacatactgcatgcggttatccaaattgacggggtcctccatacggaattcataatagtccagattgtccgtgctcaacagcgcatcgccattcttcacaatgtccagataaagggacaaattgggacctcccaccactttcacagccagcgtgtcactctgcttttggctcagcaggcggcggcctttcagcagctgcaccttgtcgcggtctacatcgcgggagttataatccgtcttatagacatccatcactgcctcggacacgctgatatagcggcggcgcttctgcacggtttcccgatagaaggcggtcagcatgttgtcattgccagaataatttactggaattttcttgatggcctcttccactatgacgcggggattattgccatagaccacaatctcgctcaaaagattgggggccggtatcatccagatggtcagctcgcccgttttttcaagttcttccagagagaggtgtgtagtgagatagccgatatgggagacttccagtccacggaaagcttccgcttccgctactttcaaggagaatgtgccgtcggcattggtcaccgttccgatattgttgccgacaacagagacgttcacgttttcgagtttcttcctgctgtccttgttcttgaccgtaccggtgatgacgagctcgttcactgccgcgtcctgcgccatcaacggggtgatacccgaagataagaatgcaaacaaacacccaagtgtaaatcctacaaagtttttcataaggcatgtttttaaggggtttctattaataagagcggtgaggaagataaaaccctatagaatggagagaaaaatacaaaaaaagtagcacgttgataatcagagagaaattttgccaagacattgccataggtttggcaaaactttgccatgcctatggcaaaagtttgccaacgcggtggcaaagtcttgccaatagtaaggcaaaaacttgtcaagctgtcggcaatagcttagttgaattgttggggcttccgctggctcagaataacgtagatgatgaccggcgcaccgataatgggcgtgacggcattcaagggaataatacccgcttcgccgggcaagacgcaaatcagattgcaaagcagtgccactgcaccgccactcaggatggtaaccggcaatagggaattgtgattggttgtccccaatatcatgcgggccacatgcggcacggccaggccaataaaggcgaccggaccacagaaagcggtggtgacagccgtcaagagcccggtgataatcaaaagccagttgcgcacacggcggatattgacacctagattttcggcatagcgctctcccagcaacaaggcgttcaggggctttatcaacaataatgagccgaacagtcccacaatggtgaccagcgcaaaggccggcatctgctgtagggaaactccaccgaagttgcccagcccccatatcatataggactgcaccccctctgccgtagcaaagaagttcagcagggcaatggccgaagaagcgatgtagcctatcatgatacccgttatcagcagcatgatattgctctttatcagcgtggaaaagaaaaggataagtaccataatcagcatagctccgataaatgcgccaagcagcacggagaagaagccggacagactgaacgcccctgccgtgatgctaccgccaaacagcagcatgacgaaggccactcccagacttgccccggcgttgatgcccagaatggatggtcctgccagcggattcttgaaagccgtctgcaacatcagtccgcagacagccaatgcgccaccgcaaagcagcgccgtcagcgcttggggcaaacgggattcccaaaggatgaagctccagcttgccttctccccctctccaccgagcaggatacggaaaacatcggcaggcggaatcgaaaccgaccctaccagcagattgcccgcaaaaagcaataagattactactcccaacccgataccatatttccagcctttactcatagttacattatttagcacacagagacacggaggcacagagttttctattactttcacaaaagttccgtatctctgtgttcatcactccttcagtctgcaaaaatagcgcaagcctcccaaatctcctatttcgggatgcagaatctgtatcaggtcggataacaaataatcgggacggaacggagtctcctcgtagaaaggaactttcgccgtattacaaccatagacattccgggtcttgaaagccttgaaaccggtgtagccgatataatccgcctccaaatcagcatagctcatgtcgcggtcacggttgtacttcaccagccagacgtcggcatcgcccgccttgtcgaaaacggtctcgaaagccagaggaacagagccgctgtgggtatcgtcggcaaaagcgtaacgcccgcaagcatcctgaaaaagccttcctatggtgctacgccctcccggcacgtaccatgccgagccgcttttcaactcactgacaacggagaacgaggtggatgaaagttgcgcacgcatcttgaggcgttggtaacaactgtccacttcagcaaaaaggttgtcggcttgtggcgcaaccccgaagagcagtccgtagaaacgcatccactcggcacgtcccaaagcggaggtttccatgtagtcggcacattcgatgatgggaatatccagtttctcgatacggccataaccgccactgttctcgaacggagacagaaggatggcatcgggatgcaggtcgatgatgcgctccatatcgggattcataccgtcgccacaatcggcgatggtgccccggcggcaggcttcgtgaacggtgggcagtttgatgtacttcaagtcgcagacaccgccgatgctaccaaacacacccagattatccatcagtccgcagtggacggaagagtagatgactgatttggagagcggggtacgtaccacagtacctgccggaagatgtgccgggagttcgcggtctttcgggaccagtatataggtatgtagcgtgtgcaacgtatcccaaggattgcgcaaggtggcaagggtatagccgggataggacactaaggtaagattctctgcataacgtaagggaatggtgtcaccgttggccaaagcagaggcagtcttgccccttcctccgcaggaggaaagaaacaggactgcgaacagacagataagtaaactatttcttttcattgatattaattgaagaagatagcagaattaggattcatacctcctgcatcgaactgctctataaaggtaccgtctttcttgaaacgataaatggtgccgttcgtggtatattcagaagtaccaatatagaaatcaccgttattatcatttacttccaacatataaatcgtagaagttttcaacttttccggtatatccttcaagaaagaagcttcatccatctttccagtctttatattataagtaaaaaaagaagcggtaggattggtgtaatttgaataagtcaaatagagaatatcatcagtagcacacatacgggtggcactgcctaattccgtcaccttattgttggcagcagggtctatcatctgtaatgaatagccaatatcaacataattaccccatgaaatcaaaaaaaccttatcatcctcttcaaccaaagcattggggttcaaacctaccgtcaacgtctctttcaacttgaaagtacgcaaatctatcacctttacgtcattgtgataagtgctccaatcagcagtacagctattcgccacataaagcatatcctcgcagattgccacaccttccagattgtcgccaagtccggtcaatttatccactacctccaacgttttcgcattgattttagctacagctcctccgtagaaggaagcatagatatatccatcctcagcatcgatataacgaatgcctgcactgaggtcgttgtcgtctacaaacgaaacacgtttcaactccacacccgcagcattcagcttagtcagataattggaaccacttacagctatatatatttcatcttcatactcaatcatactctgaccaaggtcacccaacttggcgttgttttgagtctggtaaatatcactgatgaaatccgcatccttattgggtgcataaaaggcaagtcttgcgttattagctccccaaccaccctcattcagaatataaacacgcgtctgcggcagtgtcaccttcgacccgccgtcatccagagaatcgtcatcgtcgtcactacaagatgccaaagaggcacccaaagcaagcatgcagagcataccgaataataaacttcttactttcataatcacagttgttattgtttataattagtttttgttgttcataaatagattattcaaaacttgaaagtacccgtcaaccgccacgaacgacccggcataggataatattttatcacgtcatactgttcatctgtcagatttataatctcggcctgcaacagaagccggcaaccgcccaaagcaaactcatgagagaggctcatcgtatgctccagatagccttcaatctcattctccggaatgttctgcgacaaatagtaacgctttcccactcctaccgccgagtagcccacattcacccacggcgtttccacaatgacagacgcgtttccgctatgaagaggagtataaggcaattggtccttatagttcttcgcgtcggaatcggtcaggtcaatggccttttgccatgtatatccgcccgacataatcagtcttattttctccgtcaatggaacggttgccgccaaagtagcatccacacctgcggcatgcaccttgccgtagttcgccatcttccacgcataggtggtgggaaaagccacaatcttatccgtcacatcattatagtaaccgtcgagcgtaacggagatatagtcgaacacagacaatccggatttgctccatgtgataccgacattatattcgtctgccttctcgggtcgcagattacggttgcccagccggtagtaatagaggtcgttgaaagtgggcagacggaacgtactcttatacatcaaccggaaatacagcgactcgtcctgccaaggctgcatactgactgataaagagggggcaaagcgatggaagtcatcggggaccgtacctttctcggcatgctccgaagtggcagtatgcaccagcgaagccgtggccgtgagccatccttgccggtagcgtgcattgaaggcactgatggaagtatatcttgtagggaaaggacattccggcaaactgttgcgcaacttgtttatcaccccatcctgcgccaacgaaagggtcaaagcttccaaaggacggtagagaacggtcgcggaaatataatattcgtcttgccggtgattttcccgataatatccgtcggcatattccttgccctcatccttatattggttccagccatgattatactttgcctgtgcctgcaaactccaccggggcgaaaaatgcttcctataacgtgcctgcacaaaagtattctcatcccaaagcgtttcatcggaaaggggattatagagcgtaaccgcccctggaagtccccggcgggaatagaagtagtaacccttcacatccagttcgctgtcatccttgaaagtatgataaaaggtagcttcgccctgccaggaatagatgccggagttgttacgtttctcttccgtcacgtatttcccattgaccagcgtgaaagggtaattaccgtccgccctcatataaccggcatctaccgccacgcgtgtacggcagcccagtttctgccaccagcgcagcgaggggctgaccatgccgaacgaccctccgcgcacccgtgcctgaaaagcggcattgcgcccgtcatcaaaatgaggtttttccgtctctatgcccagcacaccggccgacgcatacaagcgggcggactgtaacaagtcctccgactgcccgatggcgagcgaaagcatggaaacattgtccagcgaaaaacgcccgatatctatctgccctgcctgacaattgctcaccgccaccccgtcataactgacagctgtatgggctgctcccatattgcgtatggaaaccgttttcagtcctccaatgcctccatagtcctttacattggctccggcaaaacggcgtacagcatctgccatattctgtattcccagctggctgatatcctgccgtgacattgtctgtatgggtacggcagaagtcactttattgggcgacctgcgtgctgtcactgtcactttctctatctgatgcactttccccgtaatcgtatctccccccacctcctgggcagagagccggagtatacttgcacccaatgaaacagcacagaccagtaataccttagtccttcctgacatagaataaatgaagattatcttaaaccatttgcgcactgcccactttcctcgaatggacaatttttcgactttgttttgcaggtcttctgactcgttcccggtacatcgccttcccgttctttccgaagaacagtggcacaagtatgatacaccgagcatggaactcacagcagcgggactgttcgggactttcacccgattcccttttcatccgcttctccggatagagaacgcggaacaaaacgtggacaaagataggataaataaaagaagtttcagtaaacaataaaacgaatattaccgttttaacagtcatttttttaactttgtaacataataaccccaaaatcgagttgccatgaaatataagttattggttcttgatgtagatggaacgctactcaatgatgaaagagaaattagtaaaaggacattagctgctctgctaaaggtccagcaaatgggagtgcgcatagttttggcatccggtaggccgacttatggactgatgccactggccaaaaccctcgaacttggcaattatggagggtttgttctctcctataatggttgccagataataaaagcacagaacggagaaatattgtttgaacgacgcatcaatccggaaatgctgccttatctggaaaagaaagcccgcaagaacggctttgccatcttcacctaccacgatgataccctcattacggatagtccggacaatgaatatataaagaatgaagccctgctaaacaatttgaagataatcagggaagatgaattctctactgccatagacttcgcgccttgcaagtgcatgctggtgagtgataaggaaaaagctctgatagggctggaacaacattgggaaaaacgcctggcaggtactctggatgctttccgttccgagccttactttttagaggtggtgccctgcggagtcaataaagcgaatacgttaggcgccctattagagcatttgggagtaacacgggaagaagtcattgccgttggagatggcgtatgcgatgtgaccatgctccaattggccggcatgggggtagctatgggacattcacaagattctgtaaaggtctgtgcagactatgtgactgcatcgaatgaagaagatggagtggccctggccgtagaaaaactaatattggcagaagtgcgtgcagcagaggtgcctcttgatttactgaacgaacgggcacgacacgcattgatgggaaacttgggcattcaatacacatacgcttcggatgagcgcgtagaagcaaccatgccggtcgactaccgtacccgccaacccttcggcattctgcatggcggtgccacccttgccttggcagaaaccgttgccgggctcggctccatgattatctgcgaatctgatgagattgtcgtgggaatgcaagtcagcggaaatcatatttcttctgcacacgaaggagataccgtaagggcagtggcaaccatcgttcataaagggcgttcatcccatgtgtggaatgtggacgtatttacttccaccaataaactggtctcctctatacgggtagtgaatagtgttataaagaaaagataaaataactgttataaactacgtaatgtaaatgcatgaaaatcaaaaaggaacgagggggttaaccaattcctcggttttatccttacctttgtaaattatattagaccttaattccgcaacactattacaaatataactttttaagtacctgagcaacaaaaagttgctcaggaatttgccatgtcagatttttcacctatcttagtgttgcaaatcaaaatatgtatcaaacccgacagacatggcaaaggtagcaattaaatccgagaaactcactccttttggaggaatattttcaataatggagcaatttgactccagactctcatctgtaatcgactcaaccctcggtatgagatgcaggctgtatggttatcaatacagcgaaatcatccgttcgcttatgagcgtttatttttgtggcggctcatgcatcgaggatgtcaccactcatctgatgtaccacctttcgcttcatccgacacttcgcacatgcagtgccgacacgattcttagagccataaaggaactgacccaggataacatttcctacacatccgacactggcaagacctacgacttcaacacggcagacaagctgaatacactgctcctcaattgcctattgtccacagggcagctgaaagagggcgaggggtatgacgttgacttcgaccaccagttcatagaggctgagaagtttgatgcgaagcctacatacaagaagttccttggttatcgccctggcgtggcggttattggcaacttgattgtcggcattgagaacagcgacggcaacacaaatgtccgtttccaccagaaggacacgctgaagaggttctttgaaaggtttgaacaaaacaagcttattatcaaccgtttcagagctgattgcggctcgtgttctgaagagatagtggaagagattgctaaacactgcaagaccttctatatccgtgctaaccgatgcagttcgctctacaatgacatctttgccctcagaggttggaagaaagtggaattgggcggcattgagtttgagctggcctccattctcatcgagaaatggaaagggaaggcataccgtcttgtgattcaaagacagaagcggatagacggcgaactcgacctgtgggaaggagaatacacctaccgctgcatccttacaaatgactacgagtcttccgagaaagagattgtcgaattctataacctccgtggagggaaggaacgcatcttcgatgatatgaataacggattcggctggaacaggcttccaaaatcctttatgggagaaaacacggtgtttcttctgcttatggcactcatacgcaacttctataaattcatcatggcgaggcttgacgtgaagaggttcggactcaaagcaacaagccgcatcaagacgtttgtctttaagttcatctctgtgccagccaaatgggtcaggacatcaaggaagtatgtgctgaatatctattcatgcaacaatgcttatgccaatgtgttccagaatgactttggataacaccgacaacttatagtcgtgattttgcgtattgcctcaagtcgcatggtggggtaaggggcatttatatgtctttatggtgacattcgatgcactgtgccccctttttactaacgatgcagattcttttcgcttctgtatcatattaggcgcgtagttgcggatttgaggttgaaaagaacctaaagaggaatgggctcaaactaaaggagcatgacatcttacgtgtgtactcacaagaggaacagtgggaacgtgccttcaccgaccctgatatccgtatgaagatggaggggagcaaactgtttcaaggtgaaaggacatttgcaaacctgaaacgtttatactcgtacaccgatgttacggacgagatggttgaggagattggcaagaaccgcctgcatctgatggagaaagtacgcagaaaggtgtttactcctatccgacagaaatacaagaaggagactgatgaggtgatagcctctcatatactcacagaatgtccgattctggaggaactatatccagaactattattctacaagagcaagattatcgtgttgactgcctcaaagctgcataccacggcatcgccaaagttggtacgtaaaggtacacagccttactggaagcatataaagaactcattggtaattattgatgagtctgatcgtgtgaaagaggctgcaatgaagcgtctgtttgattgtgagtgtggtcgcagaagacgttttaacttctggggattgtgctactttatctgtcagcactaccaagaagtgatggatatgcagaaaatgcctgaatgggcagaccacaagatgaacattcaggacatgttggaggcaataaggacgaaaaagaaagagttgattgatgacattaatcctcagaaaatattgagcgggcttgagttggaggaaaatgtaaatcatggcaactttatcttttacgacgaagaccagactttctctgctgagaatgttgttctctctgttcacaataataaggaggaatacacatcctacctactcacgaagaagaaaactaaagaccaaaatgacaaaactttatcattcgtagcaaaccgcataatgctcttcttgaaggactttgtacaaattgtggataagcatgcagaagtgtatgcttcaatagaaaacgagttgcgtaagaaaaaaggcacaaatacagctgttgatttggagggtgatttggcattttaccacattattaaatatatgggcataaacgaaggtaatacggagtatcgctctgcactgcaagaattacgcaacggaaccactttccagactccacgttctaataacagtaaagaaaccgatggcaagtctatctatgataagggtatcagcttcatcgagatatattctcatgacaatgaccgctattcgtgctgcttcgactatcacgaaatgaggtgcatgcctgaaaatgtgctgttggagatggttaatcacaaccgggtgataatgtgtagcgctaccgcagactgtcagacacctatccacaactatgatttcaattatatagcaaagcaaggcgtgaaagtggagaagatgggcaatgagactttgcataagatcgaagaatatattgctctcaactatgcaaaccctaaggtggagttctctctctacaatgaagaagagactcaaccacaagaaatattggaagattacctcggtaagtgcagttcagcactgaaggattgtttagacttcgtaatggatggtaaaaacaagtttgacaagaacaactctgctcgaatagtaaatatgttgaatcattacatgaagtttatgaagaagcctgaagccagagcatggctgtacttccagccattctcatatacaggtaagagtagtataggaataaagaaagtgttgaatatactacagcaggcaagagtgacaaagcgtggcgaaacatttggggtcaacgtcatggagcagcatgttattaacgatgaaataacaagaaggcgcgcggatatctatcctgaattgaatgtctgtttcttgagtggtgagtatttcaaggatgacttggaggctgtagagaaactgttggcagaacagccaggactaaagatgttctgctttgtatgctaccagtctggcgctgtaggcgtgaactatctgtttgataccgatgccaaataccgaaagaaacactgtttggaagctccaaatacaaaagaccgcaaagacactcgctgcaactttgatggtatcattatggataagcctacgaactttatccctctgttggatgtggatgattacctcaaagcttgcatctcattaagtattctgggaactgacaaccagttggtattgaaagaaaaatctgacttccagcgtgacttactccgcagaaggcatcatcgtatacttgatgacctagccgaagtgttaaaacgtagagagatacagataaaagcagcattgaaaagcacacctgcctatgatgccttctgcttaaaatgggcagtacaggcactaggacgtatcactcgatcaacggtgtttaacaagaccatccatgtggctataggtaaggatatggcatactctatgattatcgccagaaaaccagaagttcagacagaactgctgaaacatgtgctcaagtcgatagatgaagatccatgtatacttgaccgaattaatggtaaagagtcagaagttgacattgcattcaaaaatggagaacaccgtagagaacgacatattagtgaattggtaggtattagtttcaagggtactgacgaatatgcccgtcaagctcgtaatagggtgcataagattcgtgagtatgtgatgaagcatccagaatttgataacagggaggatattgagacttctatgcgcatgtattatgtgcaaacagaggaagcaaagaagatgaacctgaactatacagactcgtgcgttcacatggatgctatcatgaggcagcaattcatacgagactactttgagaagaacgactattgcactgcatggaaaggcaaggcatgggtcatctcaccacggattattcaacaggtttacactggctatttcggtgagcaagtgttcaaggttatattggagaacgcaggttgtaccataagctcaccaagagaagagatttgggagagggccgactgggtagtgaacgaccgactgtatgtagatgtaaaatacatggtggatggtgacttcaacaggcatgtgaaagcacaggcttgggaaggcaagataaaggattgtggtggcaagtatgccatagtcaatgtacctcgatatgctggtaactactcacattcacttacccttggaagtgatccccagttaccaattataaatggtctgatagatgttgaaacagggtccgtcatcgacaagaacgtgcagaatattcttgatagattaacaacttaaaataactatggaaaagataagaaccaatcacatgatagtggaatttctctggaaagaatttctggaggattacgatttcttcaagatagaatatgataatgttgacttcgacaacattacaagtatttattgcaaactggaaggcttgtacccgaacagtgctatctgtgctttcaacaaaatggctaagaatacacaatctggcgaatcatccaagcaccgcatattcctatttgcttcatccaagaaggagaaactcacaatggcactgctgcaggaatgtctgaagaaagttaatgtcaaaattaaacagattacctatcgtcctgcttacgatgaaggtatccatactaacaatatgctaaacctattgttgtcaatgattccaaatcgtaataaaaccttgagctatgcccatggtaaactaatttgtggcacttgcagtagcatatataataaagggagaagtgcaggtgaggagttgggcctgcatattagtttcgattacgataatctcttgactgcgcgcacattaacttttgccgaggaagacaaggtaaaaaagaataacaagaaagattctccggtatatcatttggagtttgatgaaaaacgaatctatttttcttccaagaaaaagaagggaacgaaggaatactataaccatccgtctgtttttagaaaagacaacaagaatcacatacctttcctaggattcagtgatatagaacactttgaggaatcgcaggcttatcttattcgaagtgtgctgcaggactttcttacaacctattcgaagtacgtgtttgttaatccaatagagtacaaaaagcctacattattgaaagcacaggatgcagagttcaagaaagaagatgaactgttgcgtgatatgctctctacctcatggattgagatagcctgtcataccaccgaaacaggtgtggaaaagttacgaagtttgatagagcagaaatcaagggagtatatcaaaaagctgttcggcaatagctttgaaggttgccatgagaaggacaagagtaggaaacaaatctgcattcgtatcgttggtgacaaagaccaagaggaaaaactttctgatagcgaacaccaaaccttagattatagacgtttgaaagagaaaatggaactgatagaaaagaaaattcctacccaagatgtgatgattaaatcagagattgaggcggccactatcaagaatatcttccgccagatactgattaaggactattgtataaaggaggcactgcctcagtatatgatagaccgtttcaaaggatgcgtcatcacgtatgcagagaaaaagaaaaagaatctgtattactttgtacaacttaccattggcaaagacggttcgatagcttacaaggttggagaaccgcaattgactcacgatggcgtgattacagttttgggagagaattttgaatcgtacgaatatcatattcctgcatttaagaagggatataacgaaaactttatctattgcattgagaaggatggtatcacatacaacatttatgacacttgtgagtttgtcttccctgaaatggaggaaatacaccgggcactcgtgggattaaagaatatacaagtaccagttgaggtataccatgacctcatggatatggtacaaagcaatgagtcgaaggtactatgcaagcagcgtattcgtgaatatgcagataatgtgtctcatgacttgttctattcagacattaagaaactgggcaaggaagctccaccggaagagaaacttacccggaaactaatgcgatttgtaactagtaagtataatatcaagaaagggcaagacttcagaactgcaggtcgcagcgaggaaacattggctgcatgcgttaatgtacattactggaaacaggatgcgaagttgtggaagtattgcgctggcccaaatacaaaggggaattttcattctattaaccacaaagtgtatgtgcgagaaatactcagcgacataacccctgacgaggcctttgtcaacgaactgatatactcgttgggggacggttggaataagataaacgagttttccgttcacccttcaatttttaaatttctcaaggaacggttggaaatatataaagctcaagagcaattaaatgaattaacaaaaaaggtaaagtagaaatacttttggggaagataatgacgacaaaaagttcaccatacagttttatttaataggaagtgctcaaaatattatataaataagaaacaggattcagctataatcatcttaaggggcgggaccacccgtcccttaagatggccgctctccgaccgatgagcttgagagagaacacgtatgacacagtttaatttacgccctcttatttaaagtcttctctctatatattgatgcggaagtttaatttttccacccaatttgagggataaaaaaacaaaaaaagtggaaaagacatagaggaaaagcaattttagggtgcattcgggaggagggaaagaagcttttttgatgatatatccatgaaccagttggcttttatcggggtaatttgaataaatgtagtatctttgctgatgagtttttttaataagaatgtctcatataaacaagatagtaagaaggtatggcaagaattagaatcaaaaatttcggtcctatccgacaagggcgtttggataacgacggttggctggatatcaagaatgtttctgtattcatcggcaaccagggaagcggaaaaagctgtgtggcaaaattgatctctacgtttatgtggattgagaaagctttggtccgcagtgattatgccatagcggatttctcagcagagaagttcaggggtacttattgcggttatcatcgtatcgagcgttacttttataataagcagaatgaagatacggcagagttagagtatgagggtgaagcatattcaatgaaatatagtaagggaaattttgaaataaccaagggacctatgcagggatatcatttgccacagattatgtatgttcctgccgaaagaaatttcatcagtattataaaagaagcaaagtcactcaaagctttgcctgactctttgcttgaatacctcacagaattcaacaatgctaaagatgccataaagggatatttgtccctacctatcaatgaggcaaatatagaatatgataagctaggtgatgtcataaatgtgtccggcaaagattataccgtggaattgtccgaggcatccagtggttttcaatcgttagttcctttgtttctggtttcctggtatcttgtcaatagggtaaaggggcaggtggaaaatccacagaagatgagccaaaatgaattgcaacgattcaacgagggggtgaaatccatttgggcagacaaaagcctgactgatgagcaaaggcgtaccgcgctgtctgctttgtctgctcaatttaataaaacagcttttattaatattgtggaagaacccgaacagaaccttttcccgtcatcgcaatggaaaatcatacagagcttgttggctttcaataattcactggaagcaaacaagcttattataactacacatagtccgtacctaattaatgtcctgacaattgctgtcaaagctggtatgctcaaggagaaagctacttcgaacagtgatgtattggaacagatcaatgctgtttatccgatagattcatctatgaatccgacagatattgctatttatgaattggatgaaggagacggtagcatatctctgttgaagacttatcaaggattaccatccgatgataacttcctgaataatatgcttgaggaagcaaacgaaacttttgcagaattattagaaatccaacagacattatgattaacttttttctgaaagagcatattacatcatccagtaaaagacgatttggagtttgtgaccctcctgcgtcggagcagaaagcatatatagcagagggcgagggtgagaactggatagctgtggtagataactactatgagatagaagtgaagtttgtacctgtcgatcactgtatcgaacttctgaagcctgacggtacaatggataaccgttgtgatgggtgcttgttttatgagaaaacaatcattttcgtagaactgaaagacaggaatattaaaggagcaaactggattaaggacgccgagaaacaactccggcatacaatcaagcgttttgaggatgaaggggaatcgaatgcctttaccgttaagaaggcatatatagccaatagtgcgaagccccgattcagaagcggacaaacggtacgtatggaaaacttttttgcagaaacgaactatatcctcagaatagagaatactatcgaaatagattgaaaaggacaatatagaaaatagactttgctaatgttgaattattcgattcatatcaattaaatattgatgttcttttatttgggaggatgtaaattaaactgtgtcagcaaggaataaagtattaactttgctaacacagttttttttatgaaagaagaatttgatttcgagagtatcaagaacaaggccattgaacagctgtaagcattcggtaaaccacgttgcaaattttgtgaattagttccgaatcggtgctattcgtagtcgattcggaactaatagtatctattcggaacaagtttgattggattttgcccaattacgtggtagaagttcttccatattcttctcatccctctcataatatggaattttgctcaggacatcttccatccagattctagggtctacttctgctgatttgcaggtggcaatcagtgagtacacgatggcagccctgtatgcggatgcgtcgttgccgcagaacagatagttctttcttcccaaagccaaaggtcttatggcattttctatgcggttgtcatcaatttcgattcttccgtcgtttacgtatctggaaagtcttggaaggagcgtgtaagtatattcgatggctttacccatacggcttttaggaagtactctaagataagcatcctgcagccacttttcaaattcaagtatcagcggataggactcatggatacgtttttccttacgctcttcagtagtgagccctgcatcattggcatcagactctatcttgtacaacttgccgatgtagtgaatcgcctgtgtagccagggtcctgttctcttccagagcatccacgtattttcttctgacatgtgcccagcagccggccagagtaattcctttcatctgctcaaactgttcgtaagctgcatagccgtcacattgcacaatgccacggcagcatcccagcagttcacgggctaccatgcccgaacggctgccacggtcataatggaacatgacatcccccgtgatgccgtcgcgtacgcaccactcatacccctttttcgccttatgtttctcattgtccatcacaggaatgacactctcgtccacttgtatatactcactggagagtatcttctgtttgagcaggttgtacagaagcctgagtttctccaccgccatttcataccatccgcacatggtagattcgcttatgatgattcctgattcgcgatactgctgtatcagacggtagaacgggagatgatacatgaacttgccgatgataatgtccgtcaggaccgaggcgcctgccatacatttgctgaccggaacaagaggtagcgggtgaatcagaatctgcctttcctcgggatatttctccatatcggattttcttatcactttgtgacggacggtcttcaggatatatacttttgccggaacacgctccaggcgtgaactctcttcctttccgatttcaatgaaatcatccttaagcctgccttccccgtcagttgttccttcggggtaaagatcaacaacttctaccggaagagaagatgtatccaagggcttgcgggacggcttctccttgacttttatggttctggtgatttcttcttcactcttgcggacttcatcctccatccgggatatttccatggaggacatttcttcttttgagaacagaaacaactggttgggatcaagcggaagatttttttcgctcatccgtccgaagacttttttccggagccagtacagcgactgctccagcgaagcaaccctgctgataagcgccgctttatcctggcggagcttatcaatctcttccaataaggctttttcctgttcttccgtaagcatctgtatctcattgtttcacaatgtaaatatactaaaatccaatgacatacaaaagcaaacagagtaagaaaacggcactattttcgaagtttctgcaggttttcaagtctcgtgcgacgggagtcgcgggcttccatgataccctccactatcatgacaagttcccgccattctatatttgcacagacctcattgtcgttgacagaatcaggcttgcctaaggtaccggcttccagaagtttggaatacagcaccatgccgcccggctcccaatgcaggagctttatgcggtcacgggcacggtttatgaaaatatacacattgccgctgcaggggtcctgacccatggcgtcggtgatgataccgctgagagtatgaaagcttttgcgcatatcagtagggcggttatacaacagatagcgcatactgtcattaaggctgaacatggctgcaggcctggatgattgaatacagttccttgtcgttcagttcaccgcagatacgtatggcactaccggccggggtacgtatttctatctctttcaatccgcttggcgtggccggtatacttttctgtttacgtccgctcgttccggcaaatgaaggaaccggaacaaaagatccgctgtgcggaagctcgataaactcaccttgagccgttttaccagatgattgctcggcggcataacgggatttgctgtcataaaaccgccatacagggatattgagttcctccagtcttgacttataagtcattttgtgctctttgcagtagttcattatctctaccacttcttctcgtgtcatcataacttggctttttggacgtaaagttaatgatggaagttggagacgaaaatacgtggtttaccgaatgcttacgaacagctgaaagccggcaagcctttgttgggtaaggacggcgcctttgccccactattggaaagtatattgaatgcagccctggaaggagagatggatgcacatttgacagaagaagaacgccagatgggtaaccgtcgtaacggaaagatgcaaaagcaggttcagactcccttgggcgaagtaaccgtttccactccccgtgaccgtaattcgagttttgatccccagtttatcaagaagcgtgagactattctggcagaaggtgttgctgaccgtataattggcttgtatgcaatgggaaacagcacaagggaaatcagtgactggatggaagaaaatcttgggaatcgtgtttcggccgacacaatcagttccatcacagaccgtgtacttccggagataaaagcatggaaatcacggatgcttgattctgtttatcctatagtctggatggatgccattcattacaaagtaacggatgaacgtggctgcgcggtaacccgtgcaatctataatgtactgagcattgacagggagggacacaaggagttacttggaatgtatatatcaaggaatgagggagcaaacttctgactcagcgtgttgacagaccttcagaaccgtggagttgaggatattctcattgcctgtatagacggtctgaaggggtttcctgaagccattcaaagcgtttatcctaatacagccgtacagctttgtgtagtacatcagatacgtaactccatcaagtatgtaggatccaagaatcagaaggagttcttaagggatttgaaatgtgtctatcaggcagtcaataaggaatccgcagaaaatgagctcctcaagctggatgaaaaatggggtgaacagtatcctgtcgttatcagatcctggcaggacaactgggataagctgtccgaatacttccagtatactccggtcatccgtaagcttatctataccacaaataccgttgaggggtatcaccgtcagatccgcaaggtaacaaaaaacaagggcgtgttcccatcggatacagcccttgagaaacttgtttatcttgcataccgcaatatacgtaagaaatggaccatgccactggccaattgggctaccatctcgcaacaactggctataaagtttggaaaccggtttaaattattgtaattttacgctcgtcgggacgggtggtcccgccccttggcgcgggccgttccccgaccgatgagttttctagagataaataatgcgtgacacagtttattttacactacctaactgtttgaatgtactccccatatacccatcttgcagaacagtgaaaacttcacctgaattttcaccatctacaagaatgatgttatctctggcatagacaaattttcctttctctacaatggtagcagatgatttaccacgtaggtattttgcatccagacagatgctctttccgtttcttttttcaccgtctatcagttggcatatatctttcaaacgtagcacagaccaattgttaggatattcaaaaggaagctcaatttcaacggtttgcgcatttatcctctcataatacttgttatcgtcacctttgaagataatagaatcggttaaggcagacttctttagttttccttctttgacaagttgcaatttttcttgccgtatttgttcgaataattcttgggcggtaccttcctctgcaatctgtggaactaatttaccctgtattgcctcttgaagaatagattttcttagaataataggtaattctccatttagttgcttcaatttttgatacaactccccatattttataatcggtaatgctatgttttttaccttttctacgattcttacagtttcaaagagactaggtataggaacgagtagatttgaaattttttctgcattgatattgcattgttgaacaccgatagttttgacctcattacaataatctcgtgcatacggagtatttagtaataaatttaagtactccgaatttataaaaatgggacgtaatagtattagataccctgcaaatattgcattccgttgtcccctaaaaatagcagtcttaccaactaattcagcactgttagtccgattaaacaataaatcaccatattgcaataatagctttttattatcatctaaatcattactaaaaacgagtttgtcaaatacaatttccccgtcttgaatattccccatcctaagaactggtaatataccagatggaaccgatttttttgaagttccatatttgggaggataaataagcaacgaaagtccgcaccattcccatccattcggaatctcaaacggaatctcatcatctatgcacttcacctctcccgtagcaagaaacttctcataataggaattgtcctcaccacgataaatgattgattcgtttttgtccttcttgattttcttttctttcaccagctttgctttttctgttctgatacgttcaagaagtacagaagctggttcgtcattggggtcttgtggtacaagttttccttgtatcgcccactgaagtatgctgttttttaattgttttccgttcattgttcgtaatcttcgccttgtattcctaactctcctttgctcatggcattggcaatatctattttcagttcttcgtcatagtctttactcgtcaaaaagctattgacgatgcgtagcaacaaatcttggtcgatgtttgatgccgccacgtgatatatgatagattccaatgtacgcatgcatgtacaagcgtgccagtagtatttattcttatgtaagaagtatgtacccaaagtcagtgcaatacgtttattcccatcattaaagaaatgcccggaacagaatctatacatcagataggttagtttgtcggcaaaggtcggatagtataaatcattttgcacaaaatccaatgttgcacgaataccaccttcatcacgcactccttcaaaaccaccatcactggcatcaatcattttgccatagatgtttaaggtttcatcgtaatctatgtaaataatatccttactcatcttctgcctgctttaagcgtttgagcacatctttgttatccgctaagatacggtcaaaatcaatagactggtcaccgatgaatcgttcaaactcttcaggagtaacagcttgtaggtaatctgctatattaccatgatacgcatcccggaaactgaaatcccttgaagccattttagtcctggcatcattcagataaggtttttgcattggatgttcggcaagttcgtttacaatacgctccacttcttcaatggtaagcaacttaccaccattttctttaaatcgttcactgatggctgcacccactccgttttcaaaagaagagataaccaatagaacctctgaatacaacgtgtgtcgaacattgtcttttgaatccaactttattacttctcggtattctttagcattctctttgaatacagccttgtagataaaatctgtaatctgagaatacttatatgtatgatgtccatccacatattgattgatggcagaagtaagatttttccgataattttcttctgtgattgcggcaggaagataattcacatctctacgattaatatattttgttcctccacctgtcttttcattgatggtagtaatcacaaaatccaagataagactacggacttttttagctttctcactctctgtaagcagcatacctatattcaagaaagagcggaaattaaataatccgagctgcgttgttttgctcgcctcattaataaggtgagcaaattctaacttaaactctttcaattgtttacccttacataaaatatatccattatgtttcagctcatcagaatttgattgcagataacgatctattgtagatgtatcaacttgataaaagtcggcaaccattttttttgtaaagcggtattctccctcaaagagcattccttctatatcaagatgctcctgtaccttactgaccgcaaaacggttgttaagtacattttgtctttctatgtttgagatggtcaaatctttcatatcacttcacaattatcaattacacgattttatgtctataccgagaatcttttgaatctcagaaagggttttgtctatttcatggtcgagtgcagcacgtttctcaaaatactgtttgagcaattctgccggagggagtatttcttcttcttctttcgggaacttgcattggtcaaagttgcaatccaagtcaatcagttgttgagcagtaaacacacgactcttttctccctcttcgtcacttataatttctttcctatctttccaccattcctgaataggcagtgtgtgttctaccttcattggtttggtctttgagaagtgtttgtacccttccggcatatccaaacgatagaaccatgtctctttggtcttgaatccttcttcgcaaccttcggctttttcattattaaagaaaagaatgttggttgcaatagaggtatatggggagaatatagaacccggcaaacggatgatagtatgcagattgaacttgcggagtaaattttctttaagtgcaagttttgctccatccgtaccaaacaagaaaccatctgggataatcacaccgcatctaccaccagctttaaggcggtacatgataagggctatgaataaatccgcagtttcacttgaacggtattgcaccgggaaattgctttttacactatcttctgtgctaccgccatacggaggattcataccgataacatccactttatcgctttccttgaaatcagtgatatttgttccaagcgaatcacagttagctatattgggagcttcaatatcatggagtaacagatttgttatactcaaaagataaggtagcggtttccattcttgtcccacgactgcattttgcagtttttctccatcttcggcagaaccgacgctcttactcatataattgagagcagaagtaaggaagccacctgtaccactggtgaagtcaccaaaggtctcgcccaatttcgggtcaagcatcatcacgataaagtctgtcaaagcacgtggagtatagaactcacctgcattgcctgctgattgcaagtctttcaagattccctcataaatatctccaaatgtgtggcggtcatcagcatcgtcaaattcgatttcatttacgatgttgaccacttgacgcaaaagcgttccattcttcatatactggtttaagtcagcaaatgtttcttgaacaatgcttttggctcttggtgtattggcatctatcggaagattctttaaagtaggaaacagcttttcattgacgaaagagagcaatgcttctcctgtcaacgcttcgccgtctttttcatctactgcccatttgcgccaacgcaaatcttcggggatgatggacttgtagttgtcatctttgtattcccatgtttcttcctgagtgtcatagactttcaagaaaaacatccaagtcatttgttcaattctctgtgcgtcaccattgataccagcatcttggcgcattatattttggattcgctttatgatgttgtttactgccatttttaagctgatttatatatttgatattcaagttctctgatagcttgttcaaaagcgactttgccaccgaataactttatgattttagttggtttccctatactgttgaacggcggtatctccaaaatatttgccttttcaaagtcgagaataccattctctgcatatttgtcaagaagagcctccaatacttcacgagctttaccttcgtacttcccgaagtaattacgcttctttacattgtttgctctctctttccttgttaatggcggttggtcaaacgcaacgtggcatatcacatcaaagatgtcggcatccttcaatgccgaattagcttcacgtacagcatctatcagaatagcatattccttcaattcatccataatggcttgtttgcgttctgcctccgtccacgtttggataaaatcatccaaagtttggtaatggcgtaataattgctttttagcaaacgactgaacactttccgttctcatcgtcttaccatcttctcctaacactgaaacgatttcatgggcaatgcgaatattcttaccgctgataagatatttctcacgaggctcagatactattggagtttctggagtatcaatgattttgtaaggcttgggctttttccctcctccttttggtggttccgggtcaccatcaaatgctggatctttgaattttgcggtagcattgcggaaatcaaggatttccaaatgccatttgcccttgtcttttctaagtcgtgtacctcgtccaatgatttgcttaaattcagtcatagaaccaatttctttgtctatgacgattaaaccacaagttttgcagtctactcctgtagataaaagttcagatgtggtaacaattacaggataaggctcatctacactaatgaaattgtccagttgtttcttaccttctttatcctcaccaacaatacgtgtaacatagtaaggcgactttttacataaatcgctattcatattgataagcagcgtccgcatttcggcagcttcctcaatatcagaacagaatacgattgtctttgtcatacgaccaatgtcatgtaacatttgggttatcctatgtgctactactttacgccttaacttgatggcaagatcacgacctatattctgtctttgatatagtttctgttcaatctccttgcctaataaatctatttcaccttcttctggagtccatccttgtaaatcaatattaataaagtctgctgtaaccctgtatggagctaagaaaccatcttgaatgccttgaagaagtgaataggtatatactggttcaccgaaataatccaagttgttcgcgccttcgtcagctttcggtgtggctgtcataccaatttgggtagccgcactaaaatattccaataccttgcgccatgcggaatcgtcttttgcacttcctctatgacactcatcgacaataattaaatcaaagaaatttggctgcacctccaagaatggatctggtttaccctcttttccgactaattggtggtataaagccatatacacctcaaacgcagaattaatcttagcttctccttctttaggtgagattattttagttattataccctgcttcttgaaaggtttgaagtcctgaaccattgtttggtctataagaacattgcggtctgcaagataaagtatctttttctttgctttactcttatgaagtttatggataatctggaatgcagtaaaagtcttaccagtaccagttgccattactacaaggacacgttgttgtcctcttgcgatagcttctactgtacggtcaactgctatacgttgataatatcttggttcatggctatgagcatcatagtagaaaggtgtttctattatattgagctcctccgatgtgtagcttttggatgcaagataacggctatatagttcttcctctgtcggaaagtcctctaacttaatttctgtttctttccccgtgataaagtcatgttccaagaacgcatcgccattactggaatacgcaaatttcaagtcaaggatttgggcataatccatagcttgttggatgccgcctccaatagcgtgtttattgtctttggcttcaactacagcaataggcttacctttatgatataataggtaatccgcttttttgccctctgctactgaatgttgattgccaataacaagtactcgaccatctgtaaaatagtactcttcacgcatatttacacttacagcccaaccttttcgttggagcgcaggagtaatgaacagagtgcgtatctcttgttctttgagttctttcttgtttactttcatgacaataaatcagttatgattactgctgacgattaggtctttcacgtcaatattaagaacattggctatatcgttgagcgttttgaggtctggttgaacagaattgctgcaccatttacttacagtacagttagatttcccaatctgttctgcaagccatttcccagttttttgttgttctgcaagtaccacttttagtctgtttaaattagccatgagataaaatgttttaatccaagagcaaaattatataatttacctgatagtataagtaacttccgataataattattatgaggaagctaaaaaaacggattagataccgtattttgataagattttctcgtcaatttcaatcttatgccgcccagtagtagtgcgcagattttttctaacagtgtcaaatgtatagttagcgaaccattcggcaaatgtcgccatcacaaatgatgtagtcatatctctacctatattatattgaaaagcgatgttccaagcaaagttcttcaaagagatttgtgtgagggaggaacgcttcttgatatgaatttcagtaacagaaagcacttgacggttagccacaaaatagcggacagattcgcaaatttggtaaatctctgtttcgtccaagtcaaaacgtttgaatgtatctcgtgtgtattttaggataacatttaatttttcgtcttcttctctttctttttgctgctgatactgttgttgttcacgctggtattcatagtgaaataactccattcgttttttttgaacttcttcgcagtttgagataggaaaataagctaaaggcaatgtctttttactgactcttttcttgactaataccaagaatgatggagggatgacttctataatatatcttaccacgataatacaaagatgatatatgagttttagtatgacatacccggtagccataacaaatggaagtaaactcattcgtatgccaaatatcttgcatacttgaaatgcaatcatcgaagccagcaacaccgcaatgacctctattgccaaagaatgaagtatatattgtttttgcttcatacctattgttgtttatttcgtgtgcaaatatacaacacattttcatagaaaacgaaagataaaaacagatacctttttgcaaatcagtggcttatgaaaagaaaagctaaacaagagcaaatatccaaagcaaaatgaaaacatctgcaaacaaaagaaaatacttaaataaagttaaagttttatttacgtgattttgggacgcaataactaccctgtaaacctccatcttgatataaaataatcatatttgtaccaagcgttatataaattattgatattcatctgtaattatattcgaggaagtcaaatgattccgataaggatacagataataaacaataagcaaaagcgtgcagctcaatgagttgcacgctttttgcgtttatggagttcatggttgctatgtgttttctatgggcttttttatctcttatttgcgacatgtttgcgacaagacaaaaaagtagataatgtggtacttaatcacacttatacatactaatacatacttaaaagtagataacatgccaacaatcggatttgaaatcaaacggaagtgtaaggtctgcggcaaagtgtttgtcgcaaaaacacttgacagtcactattgttcccctaaatgtggtaaagtggcttggaaacgcaaaaaggatgcaaaggatagaaacgcgaagttagaagccattgctaaacaagtatcagacatcagagagtacatttctgtaaaggaagccgtcgctatgttcggggtggaacgtagcactctgtatcgcctgattaaattgggacgtattccaactatcaatatgggtacaaggctcacacgtatcaaacgctctgaaatggaatggctttttctaaacagaccggaaagtattgcggagaaagaaaagcctgctcctaaaatatacagcttagagccggaggattgctataccattactgagatttgtgagaagtaccatattaatgacagttcagtatgggcacatgttagaaaatactctattccctcaagacaaataggaaactatgtgtatgtacccaagcaagaaattgataatctatataagtcagaagtagaatgaagaaagcattacctaataccaaagtgaccgtcaaactcagaaggtcgaattataaagaagagtggtatctgattatagaatcatacccagtttataagcgaggttctaaacgggcaagccgtgtggtggaatccattaaccggactatatccacgcctgtttgggacaaatcgtccattgcacgtattttgccagatggaacattcaactataagcctaagcgtgatttgaatgggattatccaatgccgttcaacgatagaccaagaggcttgtatctatgctgacaatatccgtaagttacgccaacacgaatacgatagtgccatcctttacactgataaggaaaacgaaatcgctgcacagaatgagcggagcgaacaggattttatcaagtatttcaatggtattataagcacacgtcatcccaatagttccgattcgattatagttaactggaggcgtgtaggcgaattattgaaaatgtattcgcatgagcaaccaattccattcaaggcgatttcagttaaactgcttgaagatataaagatgttccttcttcgtgctccaatgggagggaataagaaaggtactatctcacaaaatacggcatcaacctatttctccatactcaaagccggactgaaacaggcatttattgatgaatatcttacagttgatataagtgcaaaagtaaagggaataacaaacattgagaaaccccgtgttgcacttaccatgaatgaggtgcaaatgttggttgataccccttgcaaggatgatgttttgaaacgtgcgttcttgttctctattctcacaggattgcgccatagtgatattcaatctttgaaatggaaacagattcaacaaacaaataagggaacatggcaagcggtcgttgtacagcaaaagacaaaaagaccggattacaagcctgtcatccaacaagcacttcaattatgtggcatacgtccaaacgatgatgaagcacttgtttttgaaggactgaccgatgcctcttggatttctcgtcctctgaaagtctggatagaagcatccggtatcaagaagcacatcaccttccattgtgggcgacatagctacgcttcgctgttgctggaaaatggcgttgacatatacacaatcaagtctttgatgggacatacaaacgtcaaaactacgcagatttatacgcatcttgtaaacgaacaaaaggagaaagccgccaatacactgtatatagaaaatttggatttataggttgtggtggttatatccaccattgagcatcaacgacttatgtaataccaatcatatacttaccaccatttgcccctcatgaagcatcggctttttgaggggtgttttgtagcattgagactttcggtgaggaatgtgttagtcccaataatagtttatttcccttttattatgttttccaataaattctcgtattaatgaaacttaaatctgtcagtggtaaatgagcggttgattggtggctttcaagcacctatttagcactcataaacatccctatacttttgcggcatcaactttaatacgaagaaaatggcttataaagtaaattcgttggaggaaatgccaaatgcgttgtcctacctgattgagtccgtagaatcactacaatccaaagtaaatgccttgcaacataagcaggcaagtgattcacccaagtggatggatatagatgagctatgcgcttatctgccatcgcatccagccaagcaaacggtttatggatgggtatcaactaaacagattcccgtacataaaataaataaggcattggctttcttgcaatcggaaatagatgactggttgaagaacaaatcgcataagacacagaatgacttgatggaggaagctagacgatttgtcgaatccaaaaagattatcagatgatgggaacgactgattattgtttttcattctttcgcaagcctatccagaacatcgaaccgataagagctgtaggtattgtggatgtgtaccgctatatcaccgggcattatgcacaaccacaaaccgaagctctacgtctgatgttaacttctcctgaagccaaaaggtacaaaaccacccattttgactattgtactttttctggattattcggtaagcggaatgagaaggaactgataatgcactccggattgatgtgtctggactttgatcatgtggaagatattatggaactaaagcaaaagttactcaaccatgaatatttcgatacggaactgttgtttgtcagtccatccggtaatggattaaaatggatcatacctgtagacttgaaaggctgggaacatttccggtactttaaggctgttgccaactgcatcaaagcaacaggcttgccgttagtagatatgtccggaagtgacgttgctcgttcatgttttttgccacatgatccacaagcatatattaaccctaaatataaagatgatgtcgaagaaaatatttttcgcccaagattgggagaatgtcccttctgaaataaagcaaacagatataccaagtatcacttcattatataataaggtagaggaagatgtggaacatgttgtctgggaaatagagcagcgtgccattgatatagcacccaattataaagattgggtagaattgggttttgcgcttgtggacggattgggagaaaacggacgggagtattatcaccgcattagtaggttttatcttcactatcaaagggaagagacagacaaacaatacacgcattgtctgcaatccaaaggacaaggtattaccattcgttctttcttccatctggcaaaccaagccggaatctcgctggctccattcagcaaagaacatttatccatttttccaaatatccaaaatagaaaaacgggtaaatggataaagtcagaggaagaacttccagcatttcctgagtgtgtatttgcgcatcttccccctttcctaaatgaggttgttaacaattctatatcgctggatgaccgtgatacgatattgattggagctattgtgtgtttgtctgtctgctttcacaatgtttgcggagtttacgatgaacgaatcgtttatccgaatctttatctgtttgttgttgcagatgccggtatggggaaaggtgcgttgactttgtgccgggaacttgtagcccctatcaatcgtaatttgcatgaactttccaaacgattggagcaggagtataaggaagcaataaacgcttacatcaaaggcaagaaagatggtggaatgaccatgccagctgaaccgcccatgcgaatgcttgtcattcctgccaatagtagtgcaagttctttcttgaagatattgggagataatgacggtatcggactactatttgaatcggaaggtgacacattaagccagactttgaagtcggactatggtaattattctgatgtattgcgaaaagcattccaccatgagttagtcagtttaagccgccgcaaggacagggaatattgcgaagtcagcaatccaagagtgtcagtcgctttggcaggaactcccgaacaagtaagaaaattgatacctgatgcagaaaacggtctgatgagccgtttttgtttctatatcattcgcttcaagagaggtataagaaacgtgtttgccacaaatgatatttcccaatccaagaatgccatgttcaaactattgggggataaattctgccatttacatgaagaatttgttaggcaaggtaattattccttttctcttccctctgatttgcaggaacattttatagaatatctcagtcgggtgaatgatgaatgttgtgacgaagtagataacaaaatgcagggtgtagtccgtcggatggggctgattgcctatcgtataatgatggtgttgactgctgtccggcatttggagaatatgcctcacgaatcatattcctctgacgagactatacaattaatttgccataaatatgactattccatagccatgagtatctgtgaaaccttgctttgccatgcagtgttcatctatcgaaacttgtcaggaaatcagcccaaacgtttacaatccctttcacaagaaacgggcatttacgcacgaaggaataccctttataatatgttgcccgaaacatttaccaaaaaagattatgatgcaactgttttagctttaggtgagaatggaagtacggcaaacaaatggatagaagcctttatcaaagatggcaaactaagccgaatagaacaaggtaaatataggaagattttttgagtggcaagtttgtgttttagtgtcactaaaacctaggcggcaagcggatagaactgccactctcaaaaaatcaatttatgcacatcaaagtttagataagtatgaagaaaaagaaacttggtggtcgcccaaagttagcgaattaccagaaacgcacgaaatgtttccgggtaatgtttaccgagaacgactatatctatatccaatccaaagcccaacaggctggactgtctgtcaatgaattttgccatcaggctgcaatgggctgtgaagttggtcagcgtatcagtccggaaatggtatcggcaatccgtgacctttccggtatagccaataatgtcaaccagattgcccatcagatgcacatctatggtttggaagcagtgaaacaacaatgtttttctattatatcagaagtcagtagaattatcacccaagtaaagaataacaatcatgatagcgaagattaaaacaagagccgattttggagggatagtaaattacgccaatgatcaaaagaacaagaaaaagagtgccatacttttagcatacgaaggtgtctgtgccatcagcaataagaccatagccgattcttttcagatacaagcttctatgcgtccgaaagtaaaaagttcggtgaaacacgtatcacttgctttctctccgcaagataccatccgtttttccgatgatgaaaaaggagatacacttatggtggagattgccaagaaatggatggagcagatggggattagcaatacccaatatatcatagccaggcatcatgatacggaacatccacattgccatatagtgttcaatcggatagataatgacggtaatctcatttctgatagcaacgaacggatacgaaatgcaaaagtctgtcgagctttaaccaaagaatataaactttactttgcccctaaaaacagcaaagccagaaataagagccgtttacgtcctcatcaattacggaagtataatctacgttctgcagctcttgatgcactggctgtatctcgctcatggaatgattttcttggcattctcaaaggtcagggcatagatatgcgttttaatcatgttgagaactctgataaaattcgtggtatatccttttgtatggatgaatttagcattgcaggttctaaacttgactgtgatttgagttttaacagcctttgcgttacgtcgggcaatgtaactacagaattgattattcaaccccatcaggccataacttccagtggaggtggaggaacaagcaatgaacaaggatggcgagacgataaaaacaaggatagccaaagaaacgaacctttctataaaccctcaaaacgtagaagataatgaaagaagatgtagtagctgcgaatcttgcaaatttgcgtcaaagtatcagtgagctaaaagaatgtattgaaaaacagaatgccactgtttctaaatcggaacaatctgtaaaagtggactttgacgaaaagaccatttataatggagtcgctaaaggtttctgcacttgttggaatgaagccttgtctgtggtaaagaaacatatttggaaacaacagccgaacactttaccattttcactatggttcccgaaactcattgaattattcaagcagaagtccaaacttcttgaatatctttatcggcacgtttgcgattacaatctcaatcgtatgactattgaagcaaatacggattgcatattaaaacggcaggatgagatacttgcaaaaatcaatgaattgaaaaatccagtaaccattattccacccaatattaatgggatgtttatacgtgggcatcatataaaactccagtatgttgtggtctttattgtcgctattgttacatgggctattactgcttctgttagcagtatgaagtataaggaagaaagctttgcgtattattcgatgtatcgggctgtaaaggaacaatctgaacttatattaaaaaaatggagaaactcaaaataaagaaatagaatttgttgcatataaaaaatactgcttattaaggatttattcttttatattcttatagaatatggctaaaaggatttttcttgttattatgggatattctataaagtataaataataaaaaataaaattatgatttacggatacattagagtaagcagcgataagcagacagtagagaatcagcgttttgaaattaataatttctgtgaacgttataaacttgtaattgatggttggattgaggaaaccattagtggtatgaaatcatacaataaacgtgaattgggtaggcttttactacagattcagaaagatgatctcattatctgtgcagaattatcacgattgggaagaaatctattcatgattatggagatattaaatatttgtatgaccaaagaatgtcgtgtgtggactataaaagacaactatcgtcttggtgatgatatccaaagtaaggttcttgcctttgcttttggactatctgctgagattgaacgtaatcttattagccagcgcacgaaggaggctttggcaagaaaaaaagctgaaggtgtgacattgggacgaccaaagggaagaaaaagttctgtagaaaaatataaacttcatggaaaagaaaatcttattcatgaacttttaaaggcaaaagtttctaagcgtaaaatttctaaattatgtaaagttgatagaaatacgcttgaccgttttataaaacagtttttgacggaatgaaacagagcgttttcgtgcagcaacaaggcgtggagtgcgactttacaggctctaccccgtgggtgatattgtctcccattgaacagagtatcaaacagaagattgaagcggttggaactccacttaaagattgggatataaatatctatcgaggtgtacttactggttataatgatgcttttatcattgatacggaaaaacgtgaagcgatattggcgaattgccagacggaagaagaacgcaaaagaacggctgaacttatacgaccctcaaaagagggcttcgatattgtcattggcaatccaccgtacggagcgaaatacgacaaccaaacaaagaggtattataagaatacctatgtgacggcaaatagcatccgaggattacagaaggggtctcttgatacatatacactattcatagaattgggatacaatctgcttaggaagaatgggagttttgcctatatcgttccaatatccttgacatcaagtgattccctaacaggcgtacaccgtcttttgatgggaaactgtgataccatatacatatcatcgtatgcagtacgtcctaagcctgtttttgagaacgctgtagtaaacacttcgatacttctttttaagaagactgaaacgccatgtcagtatcttttctcaaccaagatgcacagaagagggaatgagtttgaattacaaaggctcattgataatttgcaatttgttgatgtgaaagggcaaacactttatggtcgtattccaaagataggttctgaaatagagaaaaccatcttaaacaaactcttcaactatacaaagttaggatctcttatcaagacttcagggagtccaatcatagcaggagggcgatatttcaaagtcgtaacaaattatagtaccggttcatcagcagagagaactatctatttcgctaattccaaaatcgcagatgctgttggctgcatactcagtagcagtttgtcattttggttctatcagattttttctgataatttaaattggaagacatacgagatagagaatttcacagttccacagctctcagctgaggatattgactatcttgacaagttgtattctcgttatctttctgacatagaggcaaaagctaatatcagaataacttctggagagtccacctataatgttgattcattcaaggaatacaaaattgtacgctccaaagccatcattgatgagatagatgactacatctgtccgctatacggattgacgcaggaggaaaccgattttatcaaaaattacgaattagaatttaggttggctggagaatgaatgataattggaggataatccctccaattatcataatctttcctttcagaattaacgcttattcagcatttcgatattgatagtcataattgattaaaaattttatttcaatctcagataaaccatatttttctccaataaatttatcaacctcaaatccgcaactacgcgcctaatatgatacagaagcgaaaagaatctgcatcgttagtaaaaagggggcacagtgcatcgaatgtcaccataaagacatataaatgccccttaccccaccatgcgacttgaggcaatacgcaaaatcacgactataagttgtcggtgttatccaaagtcattctggaacacattggcataagcattgttgcatgaatagatattcagcacatacttccttgatgtcctgacccatttggctggcacagagatgaacttaaagacaaacgtcttgatgcggcttgttgctttgagtccgaacctcttcacgtcaagcctcgccatgatgaatttatagaagttgcgtatgagtgccataagcagaagaaacaccgtgttttctcccataaaggattttggaagcctgttccagccgaatccgttattcatatcatcgaagatgcgttccttccctccacggaggttatagaattcgacaatctctttctcggaagactcgtagtcatttgtaaggatgcagcggtaggtgtattctccttcccacaggtcgagttcgccgtctatccgcttctgtctttgaatcacaagacggtatgccttccctttccatttctcgatgagaatggaggccagctcaaactcaatgccgcccaattccactttcttccaacctctgagggcaaagatgtcattgtagagcgaactgcatcggttagcacggatatagaaggtcttgcagtgtttagcaatctcttccactatctcttcagaacacgagccgcaatcagctctgaaacggttgataataagcttgttttgttcaaacctttcaaagaacctcttcagcgtgtccttctggtggaaacggacatttgtgttgccgtcgctgttctcaatgccgacaatcaagttgccaataaccgccacgccagggcgataaccaaggaacttcttgtatgtaggcttcgcatcaaacttctcagcctctatgaactggtggtcgaagtcaacgtcatacccctcgccctctttcagctgccctgtggacaataggcaattgaggagcagtgtattcagcttgtctgccgtgttgaagtcgtaggtcttgccagtgtcggatgtgtaggaaatgttatcctgggtcagttcctttatggctctaagaatcgtgtcggcactgcatgtgcgaagtgtcggatgaagcgaaaggtggtacatcagatgagtggtgacatcctcgatgcatgagccgccacaaaaataaacgctcataagcgaacggatgatttcgctgtattgataaccatacagcctgcatctcataccgagggttgagtcgattacagatgagagtctggagtcaaattgctccattattgaaaatattcctccaaaaggagtgagtttctcggatttaattgctacctttgccatgtctgtcgggtttgatacatattttgatttgcaacactaagataggtgaaaaatctgacatggcaaattcctgagcaactttttgttgctcaggtacttaaaaagttatatttgtaatagtgttgcggaattaaggatcaattgcatcaatatgcattttagattgtcttgcaaaaaaacatttcagtcccgttttagttgtctggctctttgaatataaatcattaagataagtatcatataaagtatttattttatcaagttcttcatctgaaaatgattcgaatgggataggaaacatttctaattcggatgatcgtaggttatgccaatctgagtgtatcagccaaaaccaatagaaaaggttacttgacaaggctgctcctacaagactttgatatttttctctgactttcaattccccttctgcagaagaatgagtaggaatcttagttattattttatagtacctaccacctgccttccggtaataaataggtaaaccttctcgtttatacacatcttttactgttgtgacacaacgctctaatttgcataatattcctaattctatttcattgcctatctttggaattctcccattgcgaatatgatgaagggcatttacaaactttaggtcatctaagagtaaccacagagattcatcagaatagcgtttgttgatatgcgtagtcataattcttgtggccttgttgctggattttttaaaactaataatggatacttgttgttctgcactttcaaatatacggcgtggtctgtctccatatgaactgacatagatttcgtcacagtgatttattagtagtctatgaagtcctgacattgcatcggaagcagtaacacttagtggaacaataaagattgcatttcctttagtgtgtaatatttggtaacctaaatcaatgaaaagcgaaaaagtatctaaagatcctttttgtatattaggtatagtttgagcagatgtaaatatatgtttgaagcatgctttgtctatagatgaaattttagcaccatacggtggattgccaatgacaatatcgaagccctcttttgagggtcgtgagaaaacatcatggaaccaggtatgccagaggaagaactgactgtttgcagacaagtccatatcttcaaaatcaatatgaataccttgttcaacgagttcctgctttacaatatctgcaatgtcctttctcagctgtattttcttgtcatgttcagggcaagcgtaatattcagtaagtttgtcgcgtagatttttgcgataaacatctaacatgctatcaaagaaagttagactttcaccagctcctattttcttttctgtcatcgttgaaaggtcaacacccttatattgctccagaagggaattcccctgcataatcttgaaatcaaggttaggcagagcctctggtgacttttcgtcaacaatcagtgagagccagaaacgaagtcgggctatatccactgctccacgttcaatgtcaacaccataaatgttgttttggataatgtgacgtttaatgttagctgcattctctacaatgtttggctcaatagcagaacggcagaagaacagttcgcgcagcaatcccattggaaaagcaccagagccaattgcagggtcgcatatcttcacatcgtacagtttctgatcaatgtattcctttaattcgcccagctgggatgcatcgtgagttgtcacaaactgacgtatacactccttgtcttcttccctcatgtctgtttgcagatatgctatcaagctttctcggcacatgtactgcacaatctctttcggcgtatagaatgcacccttatccttgttgtcctccagcaggttttcaaagatgcgtccaagcatttctgggtcaacgcccacttctgcatcgtttgggtcattttcatcgatggtaaagttgtactgcgagagcattgtcagcaggccattaaaatagctggcaggaaaatgactgggcttcttgtcaagaatgtcacgttcaaacagaccgccgttcaaatatggaatacgacagttgcggaagccttctacttttgtgtcgtaaaggtcgccctgatctgaacggttacggtctaaaccttctgtaaacaagtcttctaatatgtcatcaagaaagttttccttttgacgttcatttgcattcttgaaaatattcagcatgaaatcacgatcgccttcgccccattccttgcttgcaggaacgccaagccagcctttcttttggaggaagtgcaggaacacaatgcgtccaagaagtttcttcacatagtcacgaatgggtttttcctcacggtcacgaattttgtcagcagccatacccgtatggtcaaagcctgtatcaatgaagtgttgacgcattccgtttgtagggtcaaccatgtaattgacaaaagcttcgtattgagccttgtacttcccaaagaactctttagaaagagcttcaacgttgaatgcattttcgatgtctttaatttcaagagaattccttttgtcgtatagagctatgaagttgtcagttgccgtgcggcatgactgaccaggccccaacaggaacgtatagcgtttgctgtcggtggattcttctttgttgccactctttcggcaataggtgaaacgccaatcccaacgagtatcatcctcgtaatggaacagcatgaaggcacaagagaattgatccatgacagcacggatgagccgctggatgttcacacggttatgctccatcataacccggtcgctgactgtcacatcgaaaatctgtaaaggttcaacgccaacatacatcattccaacttgcttgatgctgcgtattcccgtcgcttctgccagttgtcttcgttcgggctgactctccaaaagctctgtttcaaaaccatcctcaaagtcatcttcaccgaaaatgggaaaaataacattgttgaggaacgaactccagccttgatatcggctgcttaaatattcttttaatgactccttattcatgggggtatttgtttacttgatggttcctaatacaatagatgcttcgccttgtttactttccacatgggctacgagtttgccgatttctcgctccagaatctcgtctatatcttgttgctctatggcaaagagacgtaaaccccgctcttctaattcctgaccaatagccaatacttttttgataatatcaaaacttcctcggtcaataaacttacgagcatttttcagcaaaatcttggattgtagtgataagctaggtgtgttgttaattttcaccaacatttcttttgcagccgtagccttgtcaccagcccttgacttgttgatgcggacaaagtattggttataagtctttatggcttctgccgaaagctgtcgccagttatctggtaatggaacacgtttggcattttctttcacacgcatatcttcaagcagttcaagcaaagaaattattttggcgttatacagaccctcggcttctgtacgtattctaattgcaagccttgcagagtgtggtgcttttactatgaaatatgccgttccacttgcagcctgtgctatctgccagtctttatcagcttgttctatttgcagataacgttcagggtgagtatccttgtattgtttcagttcatatacatacttctgcaaaggtgattcctcaccgtcaacagctttggcaatatcgtaatgtaccacactttcctcttccgagaaaatcttactgtcttcaccaaacaggacatggaaggattgtaacttggtatgtgccttgcgaaccaactgaatctgcgcatcgccttctgcacttggcatgaagttataaacatagacaaaaggctctttactgccgatacggtttacacgacctatgcgctgcatcaggcgagtggagttccaaggagtatcatagttcagaataacattggcacggtggaggttcacaccttctgccaagacctctgttgtaatgataacattgtagtcatccttccaaacaccttcgtaattggcatcgaaattttcctcaatcgtgtgttccatctcatcacgattggcagcagtaatgacaagtgccttataaccctttgcctttaccgctctcgcaagcgattgtactgtgtctatagcttccgagaagataaccaattttccagaggtattcttttgtggattaaacaattctggcttgatattctctttgaatgcatcaaatttcgggtcttgtgggtttttcgcccatcgatcatagagattagaaatgagtcggaagtcttctttcagttggatatagtattcctccttgaagtctttgcggttatattctgcattctgtcccttctcgttacgcccttgttccgtcaattttgttatcttggctctgatttcttctacacaatcattaaacgaaacacgtctaccacgtttcaatgttttggtttcatagtcaagttctttgttcacgtcaatttgcggacaaacgaaaattgtgtcgttctcccacatcttaatcatgttctctgtgtaacgtcgcaggttcaacagggattgggtgaaagcagtgaacgaactttcaagacgcttcacaagaagaatctgcatgatgattgcaagctgcttggcaacgtcgttgacaccacgattgcctcgaccagtatgttttctttcgttggcagggtcagtaaaatattcaatggcacgatagcggaaatattttaaccactcgtcagtctgcaacttttctgcctccgttggagcaatgattgtcatagtatcagagaacagttgagccaactcgtcatccatgatgtattcaagattgttaggtccaacaatttttggaaatatcaagccttgtgattccatatcatccttgtaatatttctcaacgtcagttcttgttcggcgttctagaatatcacttaacacgcaatcacgtagtctctttgacacggcatccaagcgttggcggcgctcatctgctggtatgtcgttgcttctatctatcagcgattcatattctcggttgacatctgcaaagaacctttcgatattaccactttcagccttcttcaatgtactgtcattgtggtttctctcaaaaaggtaaatctgattcttcaagtcatttggtcggttgttctgcggtgtggcagaaagaagacccacgtatggatatacccctgtattagaacaaatcttctgtatcagttcatcaagagactggtacatcaatgtggcactgttgcggaacttatggctttcgtcaatgacaataaagccataattcttttcttggagtgttccaccaaaatcgccagaatcgcggctgtcgtcatcgtcatcttcgcagctctcatcttcggcaacatttccgatgcgtccagttgtaatgaagtcaatgtatggcgcaatcttctcgtcagaatttttgtcgaacatggctatagtcttcttccaacccgattgaatggcaggaggagtaatgaccaatactttacgttctcgtccatcgtcttctggtacggacaagaaacgcttgatgatgagcgtaccaataatcgtcttgccaagtcccaccacatctgccaacataaagccaccatgttcgtgcataatgccgatacacctcttaacagcttctatttgatattccagtttgtggatgttcgctggcagataagtttctatctgttgtccgagtgatttgtctacaatgtcaccaaacttaatttgtagcaatttgatatatagttcgtatggagtgaatgattgttgttcacttttgcgttctttttccacgtcatctgttataggtgcagatttaaggatttgttctaagaattgtttgttccaaggttcagatatttcccatttttcattaaaccatatcaaatgagatttattaccaggtatttcatcaagcgataatacttgatttggagctgtttcaatatagtttaattcagcgttaccttgtaatcctttttgtgtaaaatttgtactacccacgataccaataccaatgccgtttgactttccgtcaaagatgtaacacttagaatgtaaaaattgagtttcgtcattttcattttttcgaaatacacgaatctgaatctttgaatcattgttttccgtacaataatcaagaagcagacgtatagcatctttatattcctcagtaacattaagttcgtggatatcagtttttatgaagtccagcggataatttgcatctttatatttaggtgactttaattgatttacgtatatataagggtcttttcctataagtaaacgaagcgttgttccttctttttcaatgaaagacctcaaattttcttgtagtatagctaaaccgggaatatcccaatagcctgtggcaatactaactgttttaataccatcaatggctaagcattttctcaatgttgttgtcattgaaagtgcttctatggaattatctataagtgtattattcattttaattctattctatggtttgaaaatatgcgctaattacattctttctctctcctctcttttactttttccaatcccggcatctttttagccaatgcactttctcctgctggaaaatagagaggaaaaactttatataagaaacccacaacttcactacgacttttatccatattgtaaaaagcagagcagacaaagtacattagttcttgctgactacatgtttctttaggttgtatgcttattgagggagcaactatcaagtcatgttcagcaaatgatagagcactggcaagaatagcttcctgttcttcttcggtaaacatctttattttcccagctaaccattcaagctctctttgccggagtgcttgttgtttttcgttttgatgctccaataggattgctacattttcttgttgcttttctgtcaaggcgttttctaatgcttggttctttcgtttaagaacgttgaattttagcaaagcagcaatgtacatacagaaatatcctactgcaatatcgaatattaggacaagcagataattgttacttgagttttgtatgccaccagccatatattcactaatagggataacagctaatagcatgataatggctattgcataaagcactcggtatcgcgttttatggtttacctgtggcaaagaggcaaacaaaaaggcgataatcaaaacggctatgattgcaaagagtggtatgaaagaggtctccataggtttgttgttctgtttatggtttaacaataatgcgccaataaccagccttgtctgaaccttcgtgaaccaaaattcccatacccctaaggctcttgatatttttctctatagcgcgtttagttacaccaatcttgttggccatattatcagctgtgattgaaggatctgaaataacgaggtcgattatcttttgtgcagttttactgactttcttctgtgtttccgatgtatctccgaacttatccgcatttacaccgaacttttcgaccgaactttcttcatttacaccgaactcttttgtgtttacaccgaacctttcgaccgaactttcttcgtttatagggtacttttcgagggtaccatttaccctgttggctacttcttcaacaggtattcttccgttttcgttccagttcagattatagaatgtggtgtagaaagaggtcgcttccgtttgatattgcggttctttgccttgtaggaaattgggtagtttctccgtaagttctcgcatttttcgtaagccagagccacgtttctccatgtagtccaactgtgtgaacacatccgcaatgacggggttacgacgcatggatggaactttgtatatatctcggtcttgtatttgagtaccatcgagcatagcaccaggtgataccagttccacacggtcatcgtagatgtcgatgtgtacttcaccacccatgatggtgtagtctctgtgaataaggtgatttaccaaaccctcaaagatggcacggtcggagtaatcgggaaggttcagacgatagttcggcatctttacccatccgctcatggtatagtttttgatgaaatccataccatattttaagagcagcacaaggttagcccgatgttctacggaactgatggcatcatccttatagagtccagtccaacgggtgcagaaaatacgcgattgaaataccgtgcaattatccacaaacagcaatcctgcattggtcagtttgccgtcaggagttaccagcccgaatgattccagatacttgtcattccattcctgatgggtttgctcacggaaagtattggcaaggatgatgaaagaatgtttgctggcatccacttgggtaggcagtgaatcccaagtcatgtgcgtacctttcaataccaatgaaagaagttgttgcgaattacattccacgctttcattgccaattcgcatgtatgcggtacgtgttccatcctgatagtaataataaggtgtaagcgttcctgcctttactttcacttcaagcagggtatgcccttcgtgttctatcggaataagttgaacttccggcacagggtcaagtcttgcctttatcatttcactgataaaatcagcatcggcttgtggattctccaaacctacaatcactccgtcatcgttcactccatagaacaagctgccaccgtccgtgttggcaaaagccgatacggatttaagccacgacttcactttcttacgctccaacatttccttgaaatcgtaagccgagcattccgctatcaatgtattgttatgtatctgcatagtttctttattgttgttcgggtataacatcccaatatcatacacaaaggtaaggataaaaccgaagaatctgttaaaaacatcgctttcttttgatttttatgcgtttacatctcgttatttatgaataaaaatcgtacttttatgaacaagagcgtgtgttgcttatgaatgcttattttcgggtttgtgttatatttgcaacacgtgtacgcaagtcgctgatagatatatcacgttgattttgaggaagtgaagtaagtatcggtaaacaacgataattacaaataagaatatagggtgtaactcaattagttatgccctatttctttttatatcacttttctttgactttgcttgttattcggatttttattgtatatttgtaccataattgttccgcgacaaaaaagtagataacgtgcgacaaaaatatacatgctcaaaaataacaaattataagttactgtatgccagctgcaaaatttgaaataaagcgtaaatgctcgatttgtggagaagagtttttagccaagaccatagaatcgtggtattgttctcctcgatgttctaagattgcttggaaacgtagaaaagacgaggaaaaaagaaatcttaggctggatgaagtagtaaaaagtattcctaaagaccaagactatattaaggtatcagaagcctatgccttgtttggaattagtcgtgatacattgtatcgtctcattcgtaaagagcctggaaaatccagtgtaagctgccccctaaaaccaagcgattctgcccccttgtgctaaaataatcctacccccttgattccaatataaaaatacccctgcttggcaatgcccggcaggggatttttcgtagatttgattcccgtcttgaccggtgggataaaatcatttctactatgacaacaaagatagcaaacatcctccaatgttacgcattggggatggggataaagcagataagcaggagctttgagctttcccgcaacacggtgcgcagatatgtgcgcctgtttcaagagtgtggtataccgataaaggagttggccgccatgccttccgctcgcatccaggaaatgttctctgaaggtgttggccgtaacagggaaccgtcacaacgccagcttgagcttgaggcactccttcctgagtatgctgcccggcttagccgccgaggcgtaacagtgaaaaccctgtacgaagagtaccgcgagacccatcctgacggatacagacatgccagtttcggcaactatctcatgcgttaccgtatggtgacacatgtcgtaggccatgtcgagcattatgccggagaccagatgtatatcgacttcgccggtgacaaactggaagtcgttgacagtgaaagcggtgaatgtcgcagcgttgaagtgttcgtggccatacttccgtgcagccactatacctattgtgaggcggtctggtcccagtcaaggcaggacttgattaaggcgtgtgagaacgcgcttcatttttacggcggggttccgatggcgatcgtaccagacaacctcaaatcggcggtaacccgcagcgaccgtaacgagccggtaatcaacgaggagtttgcggcatttgccgaacactacggatgtaccgtataccccacacgggtacgtcatccaaaggacaaggccttggtggagaatgccgtgaagctactttaccgatccgtctacgctgacatcgagggtcttgtattccactcgctggagtctctgaatgcggccatatccgaatcgctctcggccttcaacggacgcaggatgagcgggcgtccccagtccagacgggaacagttcgagcagattgagtccgactgcctccgcccgcttcccgccatacgccatcagatgaaagagcgacgctccgcaacagtaatgcgtaacggctatgtcaccttcaggcttcaccattacagcgtaccgaaagagtatataggcaaacgtgtcgagattgtctatgatgcggacacgctggaaatatatcatggcctgcgtctggtgaccacacaccagcgcgatgacacgccatactcctatacgaccaaggatgcccacggactgcccggacgtcatggaagttatgaaaaggatctggaacagatttacgaacgagccggccagacagataacgtcctgctgctgtatctgcgcaaggtggcggaactcaagaagtatcctcccgcggcgttccgttcatgcagaggcatcatggcgttggagaagaccttcgggctggaacggttggtggcggcaagcgcatgcgccacgcaactgcgcctatacggatatcaggagataaggcggatccttgaacgcggggatgatgcagacttcctgtcaaaagacgacattgacgatgaggtccccgtaacatctatccacaaaaacatccgcggagcagcctacttcgcacaattaaaacatttaaatagagacaacaatggaaacaaataatcttaccgcaccgatagctgtcgaaaaagaccgcaacacgttgacaatcgaactgatgaaccgtatgaagctgcacggcatggccgccgccttcactgaaagcctaacctccactatggcagaaacaatgacaatcgaatctttcctgcacatgttacttgccagggaatgggactaccgtgccaatgcagccatccaacgccttatacgcggggcggcgttccgctacaaggcctgcctcgagcagatagactatgcaatcccgcgtggccttgaccgcaatcagatggagcggcttgcatcgctggagttcatccgcaagggacagaacctcttcatcacagggtcatccggtaccgggaagagcttccttgccacagcaatggggtatgaagcctgcaagaagggcatacggacatattatgcgaatgctccgaaacttatgggtacgcttaaggtggcaaaagtaaaaggcacactggaatcggaactcaagagaatcgaacggagcacgctgctcatattggatgacctcttccttgtgaaccttgatgccaaggaacgacccatcctgctcgatataatagaggaccgacatgggcgcaagtccatcatcatcacctcgcaactgccaacggacaattggtatgatgcaatcggagaccctacagtagcagatgccattatggatcgtattatacatacggcgcaccggattgagctgacaggagaaagtgtccgtaaaatggctgcatacagagggaaataaactaaaataataataaccccatcggtcaagactttttaagggggcattgttgaatgttttaagggggcagaatcgcttggttttagggggcagcttacactggattttccatgagggaatagagtattttctaacatgtgcccatactgaactgtcattaatatggtacttctcacaaatctcagtaatggtatagcaatcctccggctctaagctgtatattttaggagcaggcctttctttctccgcaatactttctggtctgtttagaaaaagccattccatttcagagcgtttgatacgtgtgagccttgtacccatattgatagttggaatacgtcccaatttaatcaggcgatacagagtgctacgttccaccccgaacatagcgacggcttcctttacagaaatgtactctctgatgtctgatacttgtttagcaatggcttctaacttcgcgtttctatcctttgcatcctttttgcgtttccaagccactttaccacatttaggggaacaatagtgactgtcaagtgtttttgcgacaaacactttgccgcagaccttacacttccgtttgatttcaaatccgattgttggcatgttatctacttttaagtatgtattagtatgtataagtgtgattaagtaccacattatctacttttttgtcttgtcgcaaacatgtcgcaaataagagataaaaaagcccatagaaaacatatagcaaccatgaaccccataaacgcaaaaagcgtgcaactcattgagctgcacgcttttgcttattgtttattatctgtatccttatcggaatcacttcacttcctcaaaatcagcatcctgcacattatcgccatgctttgtattatcctgagcaccgccttgttgccctgcattcatatcaggaccagcttgtgcaccaccctgagcaccgctctgggcatacatttcagcactggcagcctggaatgccgtattcagttcggccatggcagaatctacggtagccaggtcttgagccttatgggcatctttcagcttctgcaaagcagcttcaatcggagccttcttgtcggcagggagcttgtcgccgagttccttcaactgattttcggtttggaaaatcatagaatcggcctggttcagcttgtctactttctcacgctctttcttatctgcttcagcattggcttcggcttcggctttcatcttttcaatttcttccttgctcaaaccgctggaagcttcgatacggatagcctgttccttaccggtagccttatctttggcagacaccttcaagataccgttggcgtcgatatcgaatgtcacctcaatctgaggaataccgcgacgtgccggagcaatacctgtcaggttgaactggccgattgacttgttctgtgcagccatcggacgctcaccctgcaatacatggatggtaacctccgtttggttgtcggcagcagtagagaatgtctcgctcttcttgcaggggatggtagtgttggcatcaatcagcttcgtcatcacaccgcccatagtttcgatacccatagaaagcggagtaacatccaacaatacaacgcccttgatttcgtccgtcaaaacggcaccttgcacggcagcacctacggccaccacctcatccggattcacacccttggaaggaactttaccgaagaaatcttctaccaacttctgtactgccggaatacgtgaagaaccacctacaaggattacttcatcgatgtccgcattgttcagaccagcatcgctcatagccttcttacatggctccaaacaagcttgaatcaagttgtgagccagagcctcgaacttggcacgggtcaacgtcttcaccaagtgcttgggcacaccgcctacgggcatgatgtacggcaagttgatttcagtgctggtagaagaggacagctcaatcttagccttctcggcagcttccttcagacgttgcatagccatcgggtcttgagtcaggtcggcaccttcgtcgttcttgaactcctgaaccagccagtcgatgattacctggtcgaaatcgtcaccacccagatgagtgtcaccgttggttgacaatacttcgaacacaccgccaccgaattcgaggatagagatatcgaatgtaccaccaccaaggtcgaatacggcaaccttcatgtccttgtgagacttgtcaataccgtaagcaagagctgcggcagtcggctcgttcacaatacgcttcacttcaagacctgcaatctgtccggcttcctttgtagcctggcgttgggagtcggagaagtatgcggggacggtaattacggcttctgtcacttcttgtcccagataatcctcggcagtctttttcatcttctgcagaatcattgcagagatttcctgcggagtatagagacgtccgtcgatgtctacacgcggagtattgttgtcaccctttactactttataaggcatgcggccgatttctttctgcacctggtcccagttttcgcccatgaaacgtttgatggagaaaaccgtacgggtggggttcgtgatagcctgacgcttggcaggatcaccgattttacgttcgccaccatcaacaaatgctactactgaaggagtggtgcgcttaccttcactgtttgcaattactacaggttcgttaccttcgaatactgcaacgcaagagtttgttgttcctaagtcaataccaataatttttcccatgatcgttatttttttatttgttattattctgtttcgacgtccgcctcagtggcagacgccaataaaaagacaaacgttgtgccaaattgttcagagcagccgcagatttatacttgtggcagtttatctgtcagtttggcagaattaaaatcattttttctgtcggaaattaccatttgttaatttccattccattcaaaagctctacttttgtcgctcgaatcagagataataaaacatgaacaacattaatcattttccttgcatacctttaaccgttcctccatggaggaaatattgttccaccgtggagaaaatatcattccaccacgagggaaatatcgttccaccatggtggaacgattaaggattagttaacattgggcttaatcgcagcaacggaaatgattggttttcacatataaagaaataaataagatgaatatggaaaagatgagagacagtatcgacttcaagaacacggacatcaagacattgttccgcaaactattgctccctactgtactggggatgattttctctgcactattcgttatcaccgacggcatctttgtcggaaaaggaattggcagtgatgctttggcggcggtcaacattgtggcaccgctatggttgttctctacgggtgtgggacttatgttcggagtcggcgcctctgtggtggcctccattcatctgtcacacggaaaagtcaaggtggcacgtatcaacatcacacagtctgtagtcatatcttccttgctgctgatgtgtacctccaccctattctgttcatttgccccgcaggtggtaaagctgctcggagggtccgaacggctcacgccattggctgtggaatacatgctttggtttgtgcctttctctctgttcacagcattactcaattcgggaatgttttttctgaggctggacggttcgcccaacttcgccatgatgtgcaatgtggtggctgccgttctgaacatcctattggattatctgttcatcttcccctttggctggggaatgttcggtgccgcactggcaagtgccataggtaccacggtaggtgcattgatgatagtattctatctgatgcgccgccggtgcgcactgcgcttccaccccattaagatgagccggaaaagcatgcaactgatgcgccgcaacattggctatatgtgccgattgggttcctccgccttcttgtgcgaggtggcgattgcctgcatgatgtttgtcggcaatcaggtgttcatccattatttgaaggaagacggagtggcggcattcagcattgcctgctatttctttcctattatatttatggtatataatgccattgcgcagtcggcacagccgattatcagttataactacggcctgaacgagagccaacgtgtccgccgcgcctacttgctggcactgaaaacggccataggctgcggggtatgttttgccctgaccacaatattctgcagccctgaaattgtcggcatgttcatagaccgcagttatccggcttatgacatagcggtaaaagggttgcctttgtatgccaccggcttcgtgttctttgccgtcaacatcgtatccatcggctatttccagagtgtggagcgtgccaagtatgccacagttatcaccctgctgcgtggttttatcctgctgacagcctgctttttcggactgcccctgctattgggagaccggggaatctggcttgccactcctcttgcagaaatgctgacaaccctctttatcctcgtgatttacatatccgggaaaaaggagcataaagaaaaatccgtatctttagacaagatgggctgtaccccaacataactttttcatgcaagcataaaagtcctgtcttcggtttacactatctttgcagcatggaaactatgataaagaaattctgcaagaagtataaactaccggaaaacactttgcacgaacttctgtcacacatggcagaagttcgtttcagcaagggagaactcattatcagcgaaggggaaaggaacagcaacttctatcttttgaagaaaggcatctggcgcgcctactacctgacagacggcacggaaaactccctttggttcgccgcaccgggcgacacagctttctcatcgtggggatatgtggacagcgaggtttccctcatcaacatcgaatcggtgaatgaaagcatcgcctattgtatcagtaagcctgagctggaagcccttttctcgcattccatagacatggccaacttcggcagaagaatctttgagcgggaaattctgtcggtagacagttccacagtagcctacggcacccctcccactgccaaagaaaggtacatgacgctgatggaagagaatccggaactgctgcaggatgtaccgctcaagtatctggcttcttatctctacatcactccacaatccctgagccggatacgcgcaggattaaagaaaaagtaaaagacctttttatgtcaagatgcaaaaaaggctcttagcagattatttctgtaagagccttttttatttcaacctatcttgtcagttcttcaccaacaccatcaccaggttattgtcagcatcgtacagcccgatgcctccgcctgccagcttgccaaaagactgaacggaattcaaggctttcagcacacggccttccacctccatatcagggcatgccatcatggtactgataacttgcgggaaagagattgccgacgggttttcatcatcaacctggaaagcgccgttaatcagattgcaacccgcattgccgtgcaagcgcttttctgcaatattaaattcaatgaacggctgcttctccattccgtcgggaatagcctcgcccgcagcctcactaattatccactttccttccaaatcagacaacttggaaacggactctttcttctgcaacacgactatgggacgattggaagcaccgcataaagctatattttcctttcccagcttcttatactttttcactttgttcaaagccgacaacacattattttctacagtcatatccggacaagccatacgggtacttgccaaagcgccaaggtcaatcgtgccgggcttggcattcacgtcaaacgaacccatcatacggttgcaaccactgttgccaaatacttttccagtctttgtgtcaaaaccgatatagggaaattcctgacccggagcagggactacggcagtaccattcacttcaataatattccactcaccgctgatggaagaaagagttgcggcatttttggttgatgcacaagaagacaagcccatcaacacgcttgccatacatagggaaacaaatacttttttcattgttattcgttgtttaagttaatttattcaaggggcaaatatatagaaaataacccaaatgcaagtaatttgtttaatatttgaagcatttgccccaaagtatttagcaggattttaatgtttatctaagaattaacccttatatttgctctccgtattttttataaacctaatataataatatagtacaaagaaatgggtaaagttcttattatcggtgcaggcggtgtaggtaccgttgttgcgcacaaagtggctcaaaatcctgatgtgtttacagaaatcatgatagccagccgcaccaagtccaaatgtgacgctgttgtcaaggcaatcggtaacccgaacatcaaaaccgcccaggtagatgccgacagcgtggacgaactggtagcactcttcaatagtttcaaacccgaaatcgtcatcaacgtagccctcccctaccaagacctcaccatcatggaggcttgtctgcaaagtggagtcaactatctggataccgccaattatgagccgaaagatgttgcccactttgaatacagttggcaatgggcctataagaaacgcttcgaagatgccggactgaccgccatcctcggttgcggtttcgacccgggagtgagcggcatctatactgcatacgccgccaaacatcattttgacgaaatacaatatctggacatcgtagactgcaatgccggaaatcatcataaagcattcgccaccaacttcaatccggaaatcaatatccgtgagattacacagaacggccgctattatgaaaacggagaatgggtgacaaccaagccgctggaaatccacaaagacctgacttatccgaacatcggtccgcgcgactcctacctgctttatcacgaagaactggagtctctggtgaagaatttccccaccatcaagcgtgcacgcttctggatgacgtttggacaagagtatctaacccacctgcgcgttatccagaacatcggcatggcacgcatagacgaagtggaatataacggcatgaagattgttccgctgcaattcctgaaagccgtcctccccaacccgcaagacctgggcgaaaactacgaaggcgaaacatccatcggttgccgcatccgcggactaaaggatggcaaagagcgtacctactatgtatataacaactgtagccaccaggaggcctacaaggaaaccggtatgcagggcgtaagctataccaccggtgtgcccgccatgattggtgccatgatgttcctcaagggattgtggaaaaaaccgggtgtatggaatgttgaagaattcaatccggacccgttcatggaacagctcaacaaacaaggcctgccttggcatgagattatcgacggagacttggaagtttgaaattaatgattaaacattaatcattatccactaatcattaaacattaacaaagtgaatataggagataaagcacccgaagtattgggtatcaacgaaaaaggtgtagaaatccgcttgagcgactataagggaaagaagattgtactttacttctaccccaaagacatgacatccggctgcacggcacaagcctgcaacctgcgggataattatgccgacctgcgcaaagccggttatgaagtcatcggcgtcagtgtggacagcgaaaagtcacaccagaaatttattgagaaaaacaatctgccttttaccctgattgcagacaccgacaagaagctggtagaacaattcggagtatggggcgaaaaaagcatgtatggccgcaaatatatgggaacgttccgcacaactttcatcattaatgaagaaggtattgtagagcgtatcatcactccgaaagaagtgaagaccaaagaccatgcggcacaaattttataatcattaaacattaacaacgtggcaaaaaaagacgaactgaattttgaaaatggcagcaatctggcatcgggcgaaaaactgaaagccttgcaggctgccatggacaagatagaaaagagctttggtaaaggctctatcatgaaaatgggcgacgaaagcgtcgaacaagtagaagttattcccacaggttccatcggcctcaatgtggctcttggtgtgggaggatatccccgcggacgtatcatcgagatttacggcccggaatcttccggtaagacaacccttgccattcatgccatcgctgaagcgcaaaaggcaggaggcattgccgcattcattgatgcagaacatgctttcgaccgcttctatgcagcaaaactgggtgtggatgtggacaatctgctgatatcacagccggacaatggcgaacaagcactggaaatcgcagagcaactgatccgttcctccgctattgacatcattgtagtggactctgtggctgcattgaccccgaaagctgaaattgaaggcgatatgggtgacaacaaagtaggtctgcaagcccggctcatgtcacaagccttgcgtaaactgacggcagctgtcagcaaaacacgcaccacttgtatcttcatcaaccagttgcgcgaaaaaatcggtgtcatgttcggcaatcccgaaacaactaccggcggtaatgcactgaagttctatgcctccgtacgtcttgacatccgtggaagccaagccatcaagaacggcgatgaagtaatcggcaagcagaccaaagtgaaagttgtgaagaacaaggtagctcctcctttccgtagagcggaattcgacatcatgttcggtgaaggcatctcccgtgcaggcgaaatcattgacttgggtgcagagcttggcatcatcaagaaaagcggttcatggttcagctataacgagacgaaaattgcccagggacgcgacgccgccaagcaggtcatccttgacaatccggaactggcagaagagcttgaagggcttatctttgcagaattgagaaaagacaaataacaaaaaaacttgccaatagaaaaacaaaacattctattggcaagtttccctaaaaaggttaccgcttcctattccattttttccaaacgttcttccaaagcctccatgcttttttcaaaacgtttccatgtatcggtatccatttgttctttcagatacttgttgtctttcagtttagctacattttccagccctttcaatgccagttcttgcgaatgcttcaattctccaagccaatcgcggttcttcagcttctctatctcagcccagtttatatccggaagctgtatattcacattgttaccattccagctggtattctgatacatcatgatattctgtatatccttcaaagtcatatcaccttccaaataaacaaatttcagagtagctgcaccatctacaatcataatcagctccttcaccttttcccctttacggctcatgtagaattcagaactggagactgttcccttctgcttcatcagcaattcatatctggaagactgcaccaaagaacgaagatccttacgcatttctttctttacattattatccattgtagaaagtacctgcacagagttcaactgtccggacactttcccaatataaacatctttagtaaacaagttgggattcgtttctatcattgccttggatatgtagacggacgacacgcctttcatatctccatacttgttgaataggttcttctgtgcctggcaaagcaaaggcaacatcagcagtacacctgccaaaatcattttcattgttttcatatcagattattgttgaatttcttttcttacttcctggttcaccttcgttacgtctatccgcgtttcctctatctgttcaattcccttgttcagattcgcagacacctcgattaaagtggcctgcaatgccttataagcagcttccggatcagagaaagtgtcctgaggtgtaggaggacgcatatcctctcccatgttcgtaatgccataacctgcacctacaagaaccagaatggtggcagcaatacctcctatccagcgccaattacgtttggccttgttccggtggaaaaaacgttgttcctcttcagccttttcatcaatcatccggctcagtttatcctccaatccggcgggaacattatccaccacttccccgggaaaaaagctgagaaagagtttcttgtccttctgcaagtgctcgggcacttcttcggttctgaaagcttccttcaacaactcttcttcctgctcgttggtattcccttcataaaattcggcgagcagcctttcaatttcctcgactttcatagttactccatttattaaattcctcacgtatcttttttcttgcccgggacaacagtacacggacattggtagcattcaatcccgtgacctgctctatctcttcataagaacatcccttgacatcacgcaacgttactattttctgctgttgcaccggcagacgggcaatgatgtgccttacctgctgcgcttcatcccgcacttcaaagttatctgcttgagacacattatgcacttcggccaactccacgctctgtctgctcaaagtatactttcccgaacgaagcaaatcaaagcacatatttttcaccagagtaacgctgaatgcttccggattactgataatggccagtccttcccgcttgtcccacaacttcagataagcttcctgcaccaaatcttcagcatcggcagcattctccaatagcctataagctatgcagtacaatttgcgatgatatggcagaaactcttttttaaaactttcagcgtccatgggctatttatcaatagtagattcctgtttatacccttcagacgtagggggaaaggattttgttacacgaccaggaagaaaaaatggaaaaaaaatgaaaacaccaatagcaccagcccaagagtgcgtttatttcaagacatcagcaatccgctttttaagattcaattttgcaatgtcttcaggcttcagctcaagctccaccaacaccttcgctgtggagagtctgtattcctgctctaacgtatcataatttatctgttccttatgaatggaatacaacaaagcaaaatcgtagttcaaggcacgtgagacattatacaacgtatccgtatcaatactttttctcgtaagcatatagtctacactttgaggcttaactttcagtcttcgtgcaagttccgccttggtaacttgctgttcaagcatcacgttcttgattatctctccgatgtatatattacttttttccatttatatgaaggtacaaattaatcattcatattataaggaacaccaataccaatttgtctgtatgtatcgttctttttattcataattcgtttgttttatcaaatattttatgatacttttgcagcatattcatataaacaaacaaataatatctgctatcatgaatttactgacatgtattctcatagccatccctatcggcattatttttattatgctatggatatacaatgactaccggaaatataagaagaaaaataagcttgtcattttgctgtttctcctatttccaaccactttatctgcacaatacgttgatgcgggatgccaagtatcctttaaatggctggagaaccaaaaagggaaattagagtatacaaaagatggggttacttataagtttattccaaacgactcccaatgggaaattataattcgcaacaactcttcagaagatatccgaataaactgggaaaatatgcaattcattgtggacggaagaacctcagaagtcaaataccccatactggcagaagcggaaactccctttgcaataataaaaagccaggcagaaacaagccaaaagattggcgtgacaacttatacggcaaataaagcaaactctcgaatatacaacaagaaagagattcggaaaggaaggaattcctccattactattatccttcccatatctatcggtaagcactctcaattcttcacctctttcgactttatcatcaaaaaagtaaactaactatgacttctcaagatataaaaaaacagctgaaagaaccacatttctggaacattgtattaaccggtcagcacgccgaaccgaggacaaaagcaatgctggaagcaaaaggtatcataacctggcttccacttgctccggtccggcgtcaatggggaaggatattaaaagaaatacacaccccagtcatcccgagatgtgtattcgtctatatatccaatgaggaaagaaatacattacaaaaatcctaccgtcttcttcaaccggaagttatacttcaagaactgccggactgatgcaatcagaacaagtagatatatgccaacgtactcacgctaatcactatccacaacaaggtgccttgtatcaagggcttgatgcctactgccttcagtacatcacgtgacagagaggcaccgataaagaacagagtgatagtcagcgtcttgcgagccaaagaattgattccctccccaatcatggcacccgtttcggtagtgcccagcacataagtattgaaaatcatagccagcacaaagaagaagatgaaccagggaatactgattttctgtcctttactcttaaagatgaacgaagttaccaaagccaaaggaataatccataaggcacgtgtcagctttatagtcgttgccaccttcagggcctcctcgccatatgcggcacctgcccccactaccgaactcgtatcatgtatggcaatggccgcccatgtgccgaactcatgctggctcatgttcaaagcgtggcctatcatcggaaaaacaaacaatgcaatggcattcaatataaagatggtgcccaatgccacagacatctcgctatcctttgccttcaataccggacccacagccgcaatggcactgcctccgcagatagccgtaccggagctgataagataagaagtgtcacggtccactttcaggaacttacgtcctatgagccagcctatgagcaatgtccccactacagaaataatcgtgaactccattccctccttgcccgaagccagggaagcctgcagattcattccaaatcctaaccctacaacagagtattgcaacaggtactttgaagtcttcttattgaacttcggatgtgcctgcccacacagcaacgcaaaggccaaccccaagaacaacgccaacggtggagtgacccatgccgaataggcatgcataccgggcacataatccagcagcagaaagaaggagaggacaaccagaagagatacataaataaatttattattactttgaagaaaaggcatattaatgcttttagccaaaactcgatttgaagccatactgtttactttactattattactaatgtttattccttaattttccgggtgcaaaggtagttctattttagcacacccgccaatcgtttctacttatagactataacttattgttatcgggacataaacatatagttcataaaggcttgcgacaatcctccttcctgcccttgcaactggacaaagcagaagtcgcgaagcatgggcatatcctttatctcgaccacgcggaaagtgcctgccgccagttccttgcagatggaacggatagacacgattcccatgcaatcggagttttcaagaaagagcttgatgctttcggtactacccagatacatcagtacatggagtgaggaaagcttgacgccgtgcttctggagcgagcgttctatcacatccaacgtaccagaaccacgctcacgaagcactaaaggaatagcgggcaaatcctggggagtaatctcttcgggcaactgcaaacggcttttggaatggactaccgctaccagttcatcctcaagaaaagtagtgtacttcagattgggaaggcggaaaaccccttccaccaatcccaagtcaatgcggtgttcctgcaaagcggcttctatttcccgggagtttccattgagcaaggacaagttgacctgcggaaacttgccaataaaactgcccagcaacggaggaagcacatactgcgcaatggtagtgctggctcccaacttgagttcgccaatatattcgttatgtaacaagtgcatttcatattccagccgtttatagtcctccaatatccgttcgcaatgctccaaaagcagccggcccgactcggtcagactgattttacttccctgccggtcgaaaagcctcgtctgataagtggcctccagctcctggatatgcttagttatagccggctgacttacaaacaactcttgcgaagcctttgtaaaactcaagttcttggcaacagactggaacacttttaaacggaaatcactcatatacttcttatatcttataactcgtcagacttgatgccgaatgcatgcgccaaagaataaaacaccggctccaggcggcaatacaccgggctcagaggttcctccgtgatgaagtacacagctttgccccgttcttcttcactcttgtctttgaagaaacccgccagcttctcctccactccattaccatatacctgatggaaaggcaacagcatcaaacacttcacatctgcagaatcaagtgccaggttcatcaggtcaagaaacaacgcttcggtagagactaaaccggaagaggtgacggaagaaaatgtaaattcgcccagcggcgtacggcatgcctggtgattcagtttattcacatcggatggttcacaacacttcagcacgtccgctgccggagtatgcaccagcaacacttccacctcattttcttgttctctcaagccggcgtccaatgccagatagctcaaccatgccggcaggtcaacatcgggtagcttccgtcccaacttaccttccaaaaagttctttgcaccatataccacttcattcagaaatgcaacatctatcaatatcacatttgccggaaactttatcttatcctccattatcttctattttaatacgtgattatacataatgctcctctgcaagcggagctccaaaaacctaccacacagaaagcacaaaactttgaagcagtaaaagtacgacaaatttatcaataacttgtatcatcccaaacaattaatctatatctccgaagcggaaagagaatatccttcctccgcaacacgggaaccttggagctggaacacgaagacttagctactaaaacatataggccctcactacatgagatgtgcatctcgtactacatgagatgtacacctcgtactacatgagatgtacacctcgtactacatgagatgcacatctcatgcatgacatccttatttgcccttctctttaaccaatagagtttaatacgaaaaggaactttgctccaacttcttatctaaagaagtagaaagaaacaaaacgactgatttacagacaatttgtcattttacatattttatatgcagacaatttgtccgaaatgtgccaatggcaaatcttttgcgccttcccaagtgttatgaaactgataaaatagaaaggagaacaaaatatgaactttaacaactttaccattaaagcgcaagaagcagtgcaggaggctgtgaacctggtacaaagccgtggacagcaggccatcgagcccgtgcatgtacttcaaagcgtgatgaaagtaggtgaaaatgtcaccaacttcatcttccagaagctgggcatgaacggtcagcagatagcacttgtactggacaagcaaattgattctctgcccaaggtatccggcggagagccatacctgagccgtgaaacgaacgaagtgttccagaaggccacccaatattccaaggaaatgggtgatgaattcgtctccctggaaccggtactgctggctttgctgaatgtgaaaagcactgcatccaccattctgaaagatgccgggatgacggaacgcgaactgcgggaagccatcaacgaactgcgaaaaggagaaaaagtaacttcacaatccagcgaagacacttaccagtcattggaaaagtatgccatcaatctgaacgaagcagcccgcagcggcaaactggaccccgtcatcggccgtgacgaagagatacggcgtgtcctgcagattctgagccgacgtaccaagaacaacccgattcttatcggtgaaccgggtaccggtaaaacagctatcgtagagggacttgcccaccgtatcttgcgtggagacgtccccgagaacttgaagaacaaacaagtctactccctggatatgggtgcactggtggccggcgccaagtacaaaggcgaatttgaagaacgtctgaaggccgttatcaacgaagttaagaagtcggaaggagacattatcctcttcattgatgaaatccataccctggtgggtgccggcaagggcgaaggtgccatggatgccgccaacatcctgaaacccgccctggcacgcggtgaactgaggagcatcggggccactaccctcgatgaatatcagaagtatttcgaaaaggacaaagcgttggaacgccgcttccagattgtcatggtgaacgaaccggacacgctgagcaccatctccattctgcgtggtctgaaggaacgttatgagaaccatcaccacgtacggattaaggacgatgccatcatcgccgccgtagagttgagcaaccgttacatcaccgaccgtttcttgccggacaaggctatcgacctgatggacgaagccgctgccaaactgcgtatggaagtcgattcagtaccggaagaactggacgaaatctcgcgcaagataaagcagctggagattgaacgcgaagccatcaagcgcgaaaacgacaagcccaaactggaacaaatcggcaaagaacttgccgagctgaaggagcaggaaaactcgtacaaagcgaaatggcaaagtgaaaagacccttgtcaacaaaatccagcagaataaggtggaaatagagaacctgaagttcgaggccgacaaagcagaacgggaaggcgactatggccgggtggccgaaatccgttacggcaaactgcaagcgctgaaccaggagattgaagaaacgcagcaaaaactgcacgaaatgcagggtgacaaggccatgattaaagaggaagtggacgctgaagacatcgccgacgtagtatcccgctggaccggcataccggtaagcaagatgctgcaaagcgaaaaggacaaactgttgcatctggaggcagaattacaccaacgggttatcgggcaggacgaagccatcgaagccgtatccgatgccgtacgccgtagccgtgccggactgcaagacccgaaacgtcctatcggctcattccttttcctgggaaccaccggtgtaggtaagacggaattggcaaaggcgctggcggagttcctctttgacgacgagacgatgatgacccgtatcgacatgagcgagtatcaggagaaacacagcgtttcccgtctggtaggagcgcctccgggatatgtgggctacgatgaaggtggacaactgacagaagccgtaaggcggaaaccgtattctgtcgtcctattcgacgaaatcgagaaagcgcatccggacgtattcaacatcttgctgcaagtgctggatgacggacgtctgacggacaacaaagggcgtacggtcaacttcaagaatacgattatcatcatgacctccaacatgggcagcggctatatccaaagccagatggagaagctcaacagtagcaataaggagcaaatcgtagaggaaaccaaaaaggaagtgatgaatatgctgaaaaagaccatccgcccggaattcctgaaccgtatcgacgagaccatcatgttcctgccactgacagagcccgaaatcaagcaaattgtggtgctccaaatcaagagtgtgcagaagatgctttccggtaacggtgtggaacttgttctgacaaatgccgccatagacttccttgccaatgcagggtatgaccctgaattcggcgcccgtccggtgaaacgtgccatccagcactatttgctgaacgacttgtcgaagaagctgctggctcaggaagtagaccgcagcaagcctattacagtggatgccaataccactgacgacggactggttttcagaaattaaaagcaatccgtatcccccaataaaagaggcgattcccgactattgagaatcgcctcttttattttgtatttcaatccttctccgattactcggccttgctttcctccttcgtttctgccgcaggagtttcttcaaaatccgtcataccgcttgccaccagcaaattataccaaacaatcaatttcttgatgtcggacggatatacgcggtcgcgatcgaaggtaggcaatacctctgccaggtaagcacgcaagtcgtcagcagtagctttcttcaaatccagcactacggcagcaccattttcctttttcttcatggaaagaaacacttccttcaaaggaacatcttccgtatctgtatacatggcgatatcgcccaaagaaataatcttctcattaccataggcagggaaacgcttcttgtctgcaagcgactctacaatcaacatattttttccctgagaaacaagcttatacaatcccggtttaccggaaatggacaaaatagtcttcaacataatatattctgttttgatgattagtagttatttttttcggggggcaaagataatgtaagccgaagacaatacaaaataagcttgcttatttttattgttaaggagatgcctatttgcgtaacagatagtgcattttttcagatagcgaaccgattagctctaaaacttgcggaatcaatggggtttcgccatcatttacaatgacaaaatctgcatatttacgcttttcttcgtcattcatctggctacggatacgcttttctatcaattcgcgcgaggaagcatcccgccggacggcacgtaaaatgcgcacctcttcgggcgcatagaccataacaatagcatccacttcacccgcaaaccccgcttcgaccagaatggccgattctataccgacaatgggaaaagcggtgcggcattgtgtccaccgcctgaaatcctcctttacacgaggatgcacaatacagttgatttctttggcatgctccggactaccgaaaagataagacgccaacaaaggcttgttcagcgtgccaccggcatacacttccgcaccaagcaaagctgacaattcctcgcggatcaatgaatcggatgccatcagccttttcgtttccaagtccgagatatagacgggaacacccagcacttccaacagccgggataccatactctttccactaccgataccaccggttatacctatcttaatcgccataatcaggagaaacttgctctatcagaaaatccacttgtgccggattgaagcgtacctggctcacccctttcggcagattcttaatctttaccgtatacttgtcggaacccagacggagcagttcctcataggacacgtaaatatgaaaatcatcagcgttaatctgcctgaaatgactcagaccaacctgaaacgtgacctgcaccttggaagggaaagcgcgcagcaccttgtcggcaggaaagttaacgccacgcaacggcacctccactgtcttttccgtataaatatccaccggaagcatcatctcaatggaagaaggcacaaacttcacacctttctggatacgcagggggacttgctgcctcaaggtatccgatatatcttccagcttcaccggttgcgtataggcaacagcaatcgtatccagcacgccttgcggcgcatacaccaatacggaatcgggactgaatatcgtatccgaaagataatactcacgtccggcactcagcgtgccgcgcagcttcaccggcaccagtttggaggctcccgtcgaatagatgtactccaatgtatccggcttcatggaaagcaggcgggtagaggcattcagctggttcagcactttcttttcaaactgcgagggatatatccttacttgattatccacgcccttataatcggcataatcgagaataacgggataaaagctctttcccaacatatagttgagcagtaccgttcccttatcctttaccttgatacggagttctgaagcaggttcagaggtaatcaccacattattgggcactcccttcagccgcaccggtatagaaaagtccgcctcatagtcgttgttcaaggtctgcaagagccagaagccaccggctacaaagaaaaaaaacaaaaaaatgaagaactccctgcttttatcgctaagcagaaagtccttcacttctcttgatatcttcagatatgtacgttgtatgttcctacgttcaaacataggctcacatttctattatttagatgcctgactgctgttcgcatcagcagctgcagcaaaaatagaattcttgtctatacgaatcttaacgttagaagcgatttcaagcaccacatcattgtcgttgatttccttgataacaccatggataccaccagctgtgattactttctgattcacttgaagcgatttacggaagtttgctatttccttttgcttcttgttttgaggacgaatcataaagaaatacataataacgaacatggctatcagcataatccacatcatgctaccaccaccggcagggcctgcagcgggagcctgcaggaagaatacagtcattaagttcataaatactcagttttggtttctattattaaacaaaggtattagtttttcgttaacttaccttctttttttaattgattaactattccatccaatgtaccgttcacgaagctgccacttttggccgtgctgtaaactttggcaatatcgacatattcgttcaacgaaacactcaccggaatgttcgggaaacttaatatttcggccaaggcacactgcatgattacaacatccataaaggccacacggtccaagtcccaattacgcgtattctcgctgatgaggtgacggtaatagtcacagttcaagatggcacggcggaacaaacggcgtgcaaattcctggtcttcctcatccttgaactctggtagaagttcctgattggcaccattcttctcttcaaagcgcttgatggttttcagtacgaaagtatccacaatctccttgtcgtcattccagtagaggctctggtcttcgagcacattgtccaaggcttcgttgttgaagacaaaagtcttatacagctttctccacaattcacggtcgtattcgtaagaattgtccgaagaagccatatattccttatatatatctgattccacaattttctcatacaatcccttgacaaagtcttcatcattggcccacgtgcgcttttggttggcaatgaattccgtcaattgtttgttcacttccaactgggctatgaacttgttttccacaaatttcatgttgggatacagctcctcggcagtgggagccagcttagcttttgccgcatcaatacgtttttgtgcgtagttcgtcaaagctatcatcagcatcagcaggtagttgtagaggtcgtatgcctttgaaaggctaaagaacaattctttctccgctgagtctaaatttttactgccattctgataataagcatatacaatctgtataattttaagacgaataagaactctgttgatcataattctaaagtaaatactagtgttttaacaaggcgcaaaagtaggcatttttaatgagtttacataaataaatcacattttttaatgcagatattgattatccggtctttttcttttgacagtttaaaaaaaatcgtcaattttgagcccgataaagagctaaaagctacgagatacaagttttaaggtgataatatcaaaattgagacctattataatatggaagactttaagaagaaaaacgcagcggacatgaacgacaaggagattgtattctcccaatccatcaaagcaggtaagcgcatctactatttagacgtcaagaaaaacagaaaagacgaaatgtttctcgccatcacggaaagcaagaagattgtgatgggcgaaggagacgactcgcaggtaagtttcgaaaagcacaaaatctttctatacaaagaggattttgaaaagttcatgaacggacttcagcaagccatcggcttcatccaggaacagcaaggctgctatacaagacataccactgacgaagaggctgaaagtcccgaaacgggaaaagaagaactgccgaaagaggaaaaagcgtcttcattggaaggagaaatcaagatagacattgaattttaagttataaccttttgataattcaaaaagaagctgtacttttgcaccgcttttttgcaacatcgtgtggcaagccacatcgtgtgatggtgaattaagcaaaaaatttacttaatttagagtaacacaaaaatttttaaaatgaaatcaattgaagtaaaaggaactgcaagaactattgcagaacgttcttcggaacaagcaagagctttgaaagctattcgtaaaaacaacggtgtaccttgcgtactttatggtgcaggtgaaaatgttcacttcactgtacctgcagagggtctgcgtaacttggtttacactccgcacatctacgtagttgacttggtgattgatggcaagaaagtaaacgctatcatgaaagatatccaattccaccccgtaaaggatactatcctgcacgttgacttctatcaaattgacgaggctaagcctatcgttatggaagttccggtacagatggaaggtttggcagaaggtgttaaggccggtggtaagctggtactccagatgcgtaagctgaaagtaagagctttgtataacgtaattcctgaaagactgattatcaacgttgcccacttgggacttggtaagactgttaaagttggcgaattgcaatacgaaggattggaattgctgaatgccaaagaagctgttgtatgcgccgttaagctgactcgtgctgcaagaggtgccgctgctgctgcaggcaactaatcgattctttccaagaaagactaaatattcgggaacgcggattaacgcagccaacgcagatttcatactgatttccgcggaaagttgcgataatccgcgttctttttacggctcacgagagtgtataattcaccacagattacacagattaacacagaatgaatttaatgtaccgataatcaaagatgtctatctgtgcaaatctgtgtaatctgtggtgaatactagttttaacaccctcataaacaggaagcacagactatgaaatatttaattgtaggattgggcaatatcggccccgaatatcacgaaacccgccataacatcggattcatggcagtagatgctctggcaaaagcagcgggtgccacttttaccgacggacgttatggcttcaccacaacgctgtcagtcaagggacgccaactgttactgctgaagccttccacctttatgaatctcagcggcaacgccgtgcgctactggatgcaaaaagaaaacattccattggagaatgtgttggtagtggtagatgacctggcactgcctttcggcacactgcgcctgaaaggtaaaggaagcgatgcgggacataacggccttaagcatattgcagcaacactgggcactcagaattatgcacgcctgcgtttcggcatcggcaatgattttccccgtggtggacagattgactatgtgctgggacattttaccgatgaagattggaaaacaatgggcgagagattggaaacagccggagaaatcatcaaaagtttctgtctggcgggaatagatatcaccatgaatcaatataacaagaaatgaacgaagccagaattgacaaatggatgtgggccgtacgcatcttcaagacacgtaccatagccgccgaagcctgcaaaaaaggacgcatcagcatcaatggcgcactggcaaaggctgcccgtacggtgaaaccgggagacgtcatccaggtgcgcaagccccccgtcacctattccttcaaagttctgcagcccatcgaaaagcgtgtcggcgcaaagttagtggccgaaatgatggagaatgtaacgactccggaacagtatgaactgctggagatgagccgtgtcagcggtttcgtcaaccgtgccaaaggtaccggacggccaacgaaaaaagaccgccggagtctggaagaatttacagaaccggaatttctggatgatttcgactttgaattcgattttgaggaagagtaaaaataagggaaagattatgagcgagagaataattaaatggggattcatcggttgcggagaagtgaccaaatacaaaagcggaccggcattccagaaaatagagaactccgaagtagtggccgtcatgagccgaaatggtgacaaggccaagacctacgccaaggaaagagggattcctaaatggtacgacgatgcccaggagctgattgacgacgaagaggtgaacgccgtgtacattgccactcctccttcttcacatgctacgtacgccatcatgtccatgaaggcaggtaaaccggtctacatagagaagccgatggccgttacctacgaagagtgctgccgcatcaaccgcatttcccaagaaacgggtgttccatgttttgtcgcgtattaccgccgctatctgccctacttcctgaaggtaaagtcactggtagaggagggacatattggcaatgtcatcaacattcaaatccgcttcgcccagcctccccgcgacctcgaccataacaaggaaaacctaccgtggcgcgtgcaaccggacattgccggcggaggatacttctatgaccttgcgccccaccagatagacttgctgcaggaaatcttcggatgtatcctcgaagccagcggctacaagagcaaccgtggcagactatatcctgccgaagacactctaagcgcatgtttccagtttgacagcggactggtgggcagcggctcctggtgctttgtcgcccacgaatccgcccgcgaagaccgtatagaaatcattggagacaaaggcatgatttgtttctccgtattcacctatgaccccattgcgctgcacacagaaagagggcgtgaggaaatcattgtcgaaaatcccacctacgtccagcaaccgcttatacaggcagtagtagaccacctgctgggcaagtcagtctgcggctgtgacggtgaaagcgccactctgactaactgggtaatggacaaaatactgaacaaactctgattagcgttcatggggtagaccttaccccatgtcgaaaccttcacatttccggccgaccagcttgtacacatcggcactctcgcctacaacccataccacatcgccttctacaaaaggttcatgcgggtcgggagcatgcagggtctcccctccccgctccacaccggcaatcaggcagtgatacttctcgcgtatccctgcttccttcaaggtcttgttcaggaaaggagactgcccgtccacacagaactggcgcagaatcatctcactcttctctatcacatccgtattcatggcagacaccttatccatctccttgccgaagacgttcagttcctcgtccgtagcaatcacttgtatcttgtcctgcgggaaaaggcggacagacgctccgggaatattaatccgtttcttgccccgaaggatggagaccacatggatgccgtatttctttccgaaattcagctccgccaatgtcctgcccacccatgccgactcgccggggatttcaaaatccgtcaggtgcaggtcgcgcgacagcagacgtcccgcatactccggtttcttctctcccatatactcggcacgcatgtcgcggtaccgcagattctggaagaatgtcctctctatcatgatggactgcttcttcaactggcgggagagtatcattaaagtcaccagcaacaccgccactccaaataccagtcccacagacatcttgaataaaccggctataacgaacatgacaaacgaaacacccagcagcagacgcagtacaatggtagccaccaacggcgcccggtttccacggttatctttccataaagtcacgaactcctccgaatgattctttttaatcatgatagcacgcagaaacggagctatacacagaatgatgataaaggcagccaacaaagagccccataccccgggcagactgtcgtgcacgaaaggcaccagaaaacggaacgccaaagctatcaccgccacgcaaatgatagaatatacaaccgtaatcctgactagtgcaaatatcagtttcttccacagactttcatggttcatcgtctgcgaacctaaagcataacgggtcaagaactttctccatttttccggcaaatgcgtatccacaagattggaagcggggtctgccaaacgaatcatataaggagtgaggaaagtggtgatgacagacaccgccaccacaataggatacaagaaatggctggtgacatgcagcgacacgcccagcgaagctatgataaaggcaaactcaccgatttgcgtcaagctgaaaccgcactgcatggctgtctttagcggttgccccgccagcagcacacccagcgtcccgaaaagggattgcccgaggataaccgctaaagtaatcacgacaataggtcccgcatactccacaatcatggctgggtctaccatcatgccgaccgatacgaagaagatggcgccaaacaagtccttgaccggcttcaccagccgttctatgctctccgcctctaccgtttcggcaagaatggaacccatgatgaaggcaccgaaagcagccgagaaacccgtatgtgcagccatcaccaccataccgaaacagagtccgagagagactatcagcaaggtttcctcgctcatcagcttccggcaccgcttcagcaatccggggatgaggtaaatacccaccacgaaccaaagtatcaggaagaacagcagtttggcaatgctccccagcatctccgtaccctcgaagttatggctgactgccatcgtggagagcatcaccatcaatacgatggcaagaatatcctccaggataagcacactgagcaccagccccgtgaactgtttcttgcgcatccccaaatcatcaaacgccttatagataatggtagtggacgacatggcaatcataccgcccaggaagatacagtccatccgttgccagccgaacccggtacctaccgccactcccaacaatatcatacaaaagatgatggtacacgcagcaataatcgccgcgcctcccaccttcacaatcttcttgaagctgaattccaatcccagtgcaaacagcaggaagataacgcctatatccgcccaggtctgtatattagccgtgtccatcaccgacggtgtataggccatgtgagggctggcaaggaatcctgcgactacatatcctaacaccagcggttgcttcaatttcttaaaaagcagggtcataatccccgcacaaatcaatatcagagctaaatcagctatcaaaggggctaaatgtgacataacactacttatctattaatcagagatatacaactgcaaaactctgcaatacatctgcagtagctctgcaatacatctgcagtggctctgcaatacatctgcagtggctctgcaaaagccttgcagcgtcactgcaactgctttgcagcagcactgcaaaaggtatgcagtaactttgcagcagttgtctgcacgattctacaacactcctttcgagcttggcagttcaaagtgataaatatccctcttcaccgccatcttcagcgcacgtgccaacgccttgaagatgccctctatcttatgatgttcgttctgtccttcggcttttacattaagattcatccgggcagcatcgctcaaggacttgaagaaatgcaggaacatttccgtcggcatatctcctaccttctcgcgcttgaactcggcatcccataccagccacggacgtccgccaaagtcaaggcacacttggcaaagacaatcgtccataggaagggcatagccatagcgttcaatgccccgcttgcttcctaaggcctgataaaggcagtcgcccagagcaagggcggtatcttcgatggtgtgatgctcgtccacttcaaggtcacctttcacacggatggtgaggtccatgccgccgtgcttgcctatctgttccaacatgtggtcgaagaagcccagtccggtcgcgatgtcacaatacccgtcaccatccagattcaaggatacgtatatatctgtctccttggtagtgcgacgtacttccgccgtacgctcaccggcaaagaggaattcggcaaccttatcccaatccctggtggcgagggcgcagtaatcttcaagtccgtcacaagcggcaccgccaccttcggaaacgggtttcaatgacgccgtgtcatcttgcagaagaatggcgcggcagcccagattctttgccagttccacatccgtaggccggtcgccaatgacgaaactgtgggacaaatcgtagtccgggttatcgaggtatttggtaagcattccggtacgcggcttgcgagtcggtgcattgtcgtcgggcatgctgcggtctatgcagatgtcgtcgaaggtgatgccttcgccttccaatgtcttcatcatcaggttgtgtgccggccaaaaggtctcttccggaaaggaagttgtgccgagcccatcctgattggtcaccattacaaaatcaaaatccagcttgctgcggatgaagccaagattgcgcatcactttcggatagaactccagcttctccagggagtccagctgataatcaatgggcggctcaatgactaaagtcccgtcacggtctataaaaagtagtttcttcattttaaaggatattttttttgagggaataaagggagttatcgggagttagaaggagttagaggccgatagttctttgcataagcattacttgtataaaacagcagtatcggcctctaactccctttaactccttctacatatattccttcagcgcttcaatcaatttttcattctcccctctcgttcctaccgtcactcgcaggcaatttccgcagagtgacacggagttacgattgcggacaatgatacccttgcctaccagataattgtaaatcttcacagcatccgtcacacgggccaggaagaaattggcatgggaggggaacatcttcaccatacatggcagtgcggcgaactcggcttccagattctcccgttcttctttcagtgtcttcacccaacattctatttcataatagcggtgaagcatttccactgcctgcttctgtgtcaactggttcacgttatagggatattttatcttactgaggatgccgataatatccggtgaggcaaatgccatacccagacggatggcagcacatccccatgctttggaaaaggtttgcagtacaatgagattcggatattgattcaaattttcaaggaaggaaggtgcctcggagaagtcattgtatgcctcgtccagtatcactaacccatcaaaccggcgaatcagcgtttcaatttcgctacggagcaggtcattgccggtaggattgttgggagagcagataaaaatcagtttggtatgctcatccgcagcagccagaagcttgtcggcagagaactggaaatcctcatcgagcagcactttacggtactccacatcattaacgtcagcacagacttgatacatgccgtaggtagggtcgatggccactacattgtccacacgaggttcacaaaaagcacggaacaccaaatcgatagcttcatcactgccattccctaagaagatggaatcgggactcacctttttaattttagacaattctgtctttaactcccgctgcatggggtcgggataacggttgtgcggcatgttataaggattctcgtttgcatcgagaaaaacggatgccgcagcaccattatattcatcacgtgctgaagaataaggcttcagacgccagatattcggacgggtaagttcttgtaatgttttcaccatgttatttatgatttgacaatttacgattaaaattactttaagccatcagctctcaattttcaactttcaattttcattctccaactgccccagtctcacactcacggcattcttatgcgcatccagctgttcattggcagccatcagctcgatggcagggccgatgatatttaatccttccggctttatctcctgaaaagttatcttgcggataaagctgtcaaggctgacaccgctgtatgctttggcatagccgtttgtcggcagggtatggtttgtgcccgaagcataatctcccgcactctccggagtaagagaacccaggaatacggaaccggcattcacgatacgttctgccacggaaagataatcctcggtttctatgataagatgttcgggagcatacgcgttggtcaattcaatggcttctgtcatgctgtccactacaatcagtttgctattggcaagagacttttcggcaatctctttacgtggcagtaaggccagttggcgttccacttccacctttacagcttgttgcaattcgacagaggtcgtaattaatatagcctgactgtccactccgtgttctgcctggctcaataagtcggcggcgacaaaaaccggattagctgtttcgtcagccaaaacttctacttccgaaggtcctgccggcatatctatcgccacatcacgcaagctcacaagctgtttggcagccgtgacatactgatttcccggaccgaatatcttgtaaaccttaggcacactttccgttccgtatgccatagcggcaatggcttgtatgccgccagctttgaaaatccggttgacacctgccacttttgcggcaaacaacacagcgggatgtacctttccgtcacgtcccggaggggtgcagagaacaatctccttgcatccggcaatcctggcgggaacggccagcatcagtaccgtagaaaacagcggagccgttcctccggggatatacaatcccaccttttctatggcaaccgctttctgccagcaggtcacccccggctgagtccgcactttcttgccctcaaagcgttgtgcggcgtggaaagtctcgatgttctgctttgccaggcgaatagctgctttcaagtcttcactcaccaggttttccgcttcctgctgttcctcttccgacactgccagcgaggccaacaccactttatcaaatttttcttcataatccagcacagcacggtctccctcctccttcacacggtcaataacactccgcaccgtatcaaacagattctccgtattcatcaccggacgtttcagaatctcttgccactgggatttatcgggattactaatcaatatcataatgacatgtttttaaagatttatgcataaaccatgatattattggaggtgtgtcaaaactctctgaagactttctattaggcgctgattacgcggatttcacggattcattttaccgattccgcgctatttcgcgtaattcgtacctaatgtcgtaacataaagaaagcgtttatatacttttgacacatcctcgaggctttaaattatcattttctcaatcggcagcaccagaatgccttctgcccccagcgctttcagctttccgataatctcccagaaacacttctcgtcgagcaccgtatgtaccgagcaccagccttcttgtgccaaaggcattaccgtggggctcttcatgcccggaagtacagagacaatctcatccagtttctctttcggggcattcatcagcacatatttcttatcttcggctgtcttcacggcatccatacggaacaacagctccctcaatatctcttgcttttcctcgctcatgttcttgttgccaatcagtagcgcttcggacttcatcacaacctccacttccttcaaacggttgctcaccagcgtagaaccggaacttacaatatcgaaaatagcatctgccagaccgatgcccggcgccacttctaccgaccccgtaatgacgtgtatctccgcattcaccccattctctttcaaaaagccggaaaggatacccggataagatgtcgcaatcttctttccgtgaaaccacttcacccccggatactcaatatccttcggcatggcaagagacagacggcatttgctgaatcccagacgcttgattatctccgcatcctcattcttctcaacaaattcattctcacccacaatgcctatatcagccaccccagtagccacagactgcggaatgtcgtcatccctcagaaacaacacttcaagaggaaagtttgacgactgcaccaacaacgagcgcttcatggcactcaactttatatccgattctcccaaaaacgacatggtctcgtcatacagacgacccttagcttgtactgcaattcttaacataaggttatttactattttacgatttactatttactattttgaatgagatgacagaaaacaaaacgaggcttaccaatattcggtaagcctcgtctgttatgtcatctgttgtacatatacactcatacgcccaccgagttattcgttaggatgatgatggtgatgatgtgcaacgatattcttcatattttttggattttaatgcgacaaaagtaaactaaaagtttgaaactccaaaagatttatcacaaaaagtttattttttctttcaaattcatcttagttcaccacagattacacagatttgcacaaattatttttattccaatctatgcaaatctgtgtaatctgtggtgaaacaattaaatcaacggcaatatttcctcctgctctacttcgcagctatggaaatgcatttccgcttccgccttctccttcggaaaggtaaagtaggtgcaagtggcttctgtgcaaagttcgcccatgctattatacaggcgtgcttctatgatagcaatattccgcttctgctcgcgaagcgaagcccgcagcaccacatgcgtgtcgttggtcgatatggatttgcggaagcgggtttccattttcgatgtcaccccgccggtctgcagcttgcggaacacgacccagccgcagatttcgtccagcaatacggactggatgcctccatgcaacgtattcagccacccttgatactccggacgcggcttccagatgctcaccacctcgtcaccgtcctcataaaactccattctcacaccggcttcattgtcgggagagcaaccgaaacagttgtagccctccatatctttccacggattgataatcttcttcatatcgtattcttctttatctggttttgattcataaagtctctcaataagacgttcaatattagtcattccgattgagaactacaaattattgatgcctttttcagagaaaaattagcgggatactgttcaaaaaccggttattttatttagctttgtataaatgagagagaacaacaagatgcaaagaggggcctttttctgcttatggatattatttacattctcattgtttgcgcaaaacaaggagaacggttctgtcgcatgcgacagcatcgtatataaaaataccttcagaaaagcattgaagaaattcctcaacttcagcgacttcgacactacctatatcagtcccaaccgatacaattacgccctgatgctcgaccatttcaccaattacgaatactactctgtgggcaatgacgaccagcggctccgtttctcgcccaaccctcacaacaagataggcgcttacttcggatggcgttggatattcctgggatgggctgtcgacacggactggctctacggaaagaaaagcaagaaaaagcgcggcacggagtttgacctcagcctttacagttccaaactgggagtggacattttctaccgtagcaccggaaacgactacaagatacacaaggtatccggcttttccgacgagatttcctccaattattccgaagacttcaacggattgaaagtaaagatgaagggattgaatctgtattacattttcaacaatcggcgtttctcctatccagccgccttcagccagtccaccaaccagcgccgcaatgcaggttctttcattgccggattctccgtatccacccacaatctggacttcgactataccaagctgccccaaatcattcaggaaaacatgaatccgggcatgaaggtgaagcacatcaaatacacgaacatcagcctcaacgtcggctatgcctacaattgggtgtttgcccgcaactgtctcgcctgcctgtcgttcaatccggcggtcgcctacaagacatcgcgcatagagaagaccgaagaacgggaagcggacgactggtacaagaacttcaatatcgacttcatcctgcgtgcaggcgtggtatacaacaacagcaaatacttcgtgggtacctcattcgtaggcaggacatacgactactacaagaacagtttctccctgaacaacgggttcggcatcctccaagtatacgccggattcaacttctatctgaaaaaggaacaccggaaaagtaagaaataggataaccggacttcacccctctcagaagctgtaagcacactccacccctactatattcttccgcttatcctgctcccactgcctgcaataaaagaggtccgcctcccagcgcccggacagaggcaacgtgattcccccgcgataacgcatccgtttcaccccgaaatgctcggtcctgttcagaccattatacatctcgaccgaagcatacggctccagcttgcacttcggaatgtcataggcaaacttcgcacgcgaacgcaagcggaactcatccctatgcccatcgaacgtatgctgaaagcgctcacgcaaagacagtttcaccctttgcacacgggcagacagagtgccttccaaacggtagcggtgccggaacttccagccatccgccccccggttgcggtaatgcgtctcatacccggctccaagcttcaggaaaggcaacagcttatagcttccccccaccttcagcccccaccggtctgtctttcccaaatcatcctttgtacgccactccagcccaccggaaacagtaaatgccggcttcaacttatattcgaaaccgacattcgcccaagtggcaaaatccttctcctgcgcccgcagggaaaaagacgaaacacccagcaacgaaatcagcaaaacgagtgctttcgtgcacgaagatatattacttaccataagccgttttttgttaaagcgccaaaggtaaggataaattctgtaacaattctgtaatacccttaattccgcaacactattacaaatataactttttaagtacctgagcaacaaaaagttgctcaggaatttgccatgtcagatttttcacctatcttagtgttgcaaatcaaaatatgtatcaaacccgacagacatggcaaaggtagcaattaaatccgagaaactcactccttttggaggaatattttcaataatggagcaatttgactccagactctcatctgtaatcgactcaaccctcggtatgagatgcaggctgtatggttatcaatacagcgaaatcatccgttcgcttatgagcgtttatttttgtggcggctcatgcatcgaggatgtcaccactcatctgatgtaccacctttcgcttcatccgacacttcgcacatgcagtgccgacacgattcttagagccataaaggaactgacccaggataacatttcctacacatccgacactggcaagacctacgacttcaacacggcagacaagctgaatacactgctcctcaattgcctattgtccacagggcagctgaaagagggcgaggggtatgacgttgacttcgaccaccagttcatagaggctgagaagtttgatgcgaagcctacatacaagaagttccttggttatcgccctggcgtggcggttattggcaacttgattgtcggcattgagaacagcgacggcaacacaaatgtccgtttccaccagaaggacacgctgaagaggttctttgaaaggtttgaacaaaacaagcttattatcaaccgtttcagagctgattgcggctcgtgttctgaagagatagtggaagagattgctaaacactgcaagaccttctatatccgtgctaaccgatgcagttcgctctacaatgacatctttgccctcagaggttggaagaaagtggaattgggcggcattgagtttgagctggcctccattctcatcgagaaatggaaagggaaggcataccgtcttgtgattcaaagacagaagcggatagacggcgaactcgacctgtgggaaggagaatacacctaccgctgcatccttacaaatgactacgagtcttccgagaaagagattgtcgaattctataacctccgtggagggaaggaacgcatcttcgatgatatgaataacggattcggctggaacaggcttccaaaatcctttatgggagaaaacacggtgtttcttctgcttatggcactcatacgcaacttctataaattcatcatggcgaggcttgacgtgaagaggttcggactcaaagcaacaagccgcatcaagacgtttgtctttaagttcatctctgtgccagccaaatgggtcaggacatcaaggaagtatgtgctgaatatctattcatgcaacaatgcttatgccaatgtgttccagaatgactttggataacaccgacaacttatagtcgtgattttgcgtattgcctcaagtcgcatggtggggtaaggggcatttatatgtctttatggtgacattcgatgcactgtgccccctttttactaacgatgcagattcttttcgcttctgtatcatattaggcgcgtagttgcggatttgaggaatactacaaatcttgtctgcacatttccgatacttcaataatacttaaaaacagaaaccgagatataaagtttctccgttcatccatacaaaagttccgggaatcagcaaagcgcattttcccggaacaacaatacctattgaaaactttccggtctgtatccgacagaccacgagacttagtctaaggttaatcagtttctctattcatccaaagtcttcatccacgactctattttttccaccatcggaagttcataaagatacagccaatcgctgttattggtcattgcagcaagatggcggtggtgattctggtcggcaatatacccctcgggattgctcatgaagcgggtttgcgaatatacagattcaagctccgcacgcatctccttaaaataagaacacacctttttaatctgcctcagacttgccgcacgctcatcctctccgttcgctttatcatagttttccaaagccatcaataaccgtaccggatagttcagcaaacgtccggtctgctcataaatatccaatgtataacgattgcgcaaagcatgggattctgcgtcctgcaatcctttggttattctttcatagcgcgcggcttcaatacgggcagaatccaatctattctcgtacttcctgctccactttcccggcgccccggcatcaggcagttctatcaaggtaaaagcctcggtcactccccaagccggattcctcgaaccggaaacaaccagcactccgtcaaagaaaaaggcggctttctccatctctgccagaaaatccatctgtttccgttgcaaaccaaactcacgccgggcatgcgctgtgatgaaatcttctatcgtcctcccgccgggatgccagccatactccccttgcgctatgaaaccgcgcataacagtttccagatgggccgagccgtcatcccatgccgtggtcaaaattccctccaactgattttcggcaaccaaagcgcaaaaatccttgatatactgtaccctggaattattacgcggtataaacggagtttccccggtagacgcggaagtagctcccatcaccttcagacctttcttatgataccaattaagcagcatccgatgtggcagaatggtagggtcttcgtaatgccagcgcatgtagatgcagttcttgggaaacatatctatcgctttatccaattccgccgtattccagttcttcatgacttcatcgtccggcacattgcggtgcagaagccaccacagattggcatatttcaacggcatatcgtcccagaatataggagtccgcccgtgtgccaccgcaaaatcgcatacctttttaagccactccatctgcaactgaaaagccgttttgccggttgccttacaacgctcatcaatgccgatggccgatatttcatcgccgcctatatggaggtatttgctttgtggcatcgcttccatcgcatcccgatagaggtcgaacagaacttcgtatgtgcggggattggaaggacagaattcccaatcactcttttcactctcgcgccgctcccagtggtgcttcaagatgaaactggcgtgtcccaacccttgcaccagagggctgatgttgatgttccgttcttcggcatagcggcagatggcttgcatttcctgcttgccgatggcgtttggcgcacccacttcgggacgacgggtatagcgcagcttgtcctccagctcccatatcacggcattcactttataccttgccagtttgtcaatcatgcgataatagtattccgtccggtccagatgatgttttgtatccagatgtacggcgcgataggatatagccggataatccgtaattttcatcgccggtatctccaatgaaaactgatggctgtcttccatcagctgctccaaggtctggcaaccataaaacagtccggcatgagaacgggcacggatggcaacccctttggaagagacttccaatacatacccttcgggagatgcgggcacatcctttccggtcattgagagtgtcacgccttttacccctttcaccgcatatcgcggaagcgcatccagcatatttcccagaaccgggatttctccttcccctttcatggtgacaaaagagagttcaccggcacttatgcctttccctttctgaatttccatctgctgcggcagaggcagtatctgaaatcgtttatccagaccgacagcactcatccttactgacaatcccagcaaaaagagcaatacaaatattttttcaagtttaatcataatcatccttttttaatattcagcagaaatctttttcaacataccttgtgcttccgtcactatttcccctgcgaatcttcccgaagtcaacgtaaacttctgcacaacgggattcatcagattggtggagaggatgcgcattttttcataatcctgtataccttcgcgaagcaattcaagacgaatgctcgacaaggggactgaagacaaagagttgtcactgcgataaatcaggctgaaatcccccgccgtgttatttccatccctcacatcctgcgggtcggccttggtccaataatcgtaagcccatctcaagaatccgttcaatcctttggctttggcataccaagccacccacaccatctctgccggattgttatccagacttacataggcattggggatgctctgcgcgcaactggtatagaaagtggcaacagcattcgtcgatgtgcggtcatatcccaaaatggtgctgtagtcataaaaagcactctccacatcggaggagacggcactaccggcaagtcctattttccaatccggattgtgctgctttatgaaagataccacctgccgcatttcatcttccctgatttcgtccatataaagaacagtcttttcaaaccaacccttcgttttaagatgacgctcaaaggaatccagaaactcattccaaacagtccggtattcgtcactccccactgtcagcttcaacgtccgggcttcgcccgaagcatcggtatatccgacggaagtgttccatcccaccagagaaaaacaactgatttgtctgccaatcccccacgacatcatctgagcgacaaacttgtcgaaaccggtatagtcgaagctccatttcccatcagcagcctcatgccacttaaccatggtttgacctttgttgaaagcgccgtccttgatataggcagtgataaccttttgtccggcatcagccagcaactgatagaatggtttcaccagagtgaaatactcactcgaaaaaggagtaactttttgcccattatcagcacacaagccggacagctggaaagggaactgccataaatccaaatggaaagcccattcgctcaccggaggcaaggcatgattgacaaccagcaaccttaccgtgaacgtcagttgcacctcaccacccgattttacggtgaccgtgccttcgtactctccaggcgcggtgcccgcaggaatgtcggcagtcagccaaagttttaccggttccgaagcagtcactgttctgactgcctcttcggacaacttatccgcaatctgtaccgaagtatgcgtgcggtattcattgcaaacaagagccttttcatctcccaacacataggatggaaaacgcaaatgcagattggaagaagcaatacggttgccgccggacagcaggtcgccgatttcgtacgtcaagtcatcataccgttttgattccgtccaaagcacaatctgcttatgcacgcgctcattctgccatacggtgtctttccataccgtagtcaccagcctatcatcctcctgcccggtgaacttctgtcctttagcatatctcacaaacttactttcaaacgagcctttcaaagtctccgaaggggtaacgggcggctcgggattgaccggcagttccggtttttcagtgtttccggatggcgcctcgtccgaacaagcactcgttccaagggagaaaaagaacaaagaagacaataataatgtaatttttttcataagtgtcatccgtttttcttgattgaatagtcataatacggcggctgactcaaattcagtgtaatcgtataattcccagccgtcccgatttctatgtccgtaccctcttccgacagtttggaaagtccttcggacgctccatatacaattatcgggtcgccataaccgacagcaatggtggtaaacttcagcgttcctggcgacaaatccgtatccaggctccagagacgcgtttccgaagaataggtcatagccttcaaggaactgatggcagagcctgtaaccgcccattgcgtgtggagcagcgtcatcacctgagtcgccgcatcgaaattaatcttccatacgcccggagaagtaatttcgggggttccgttattggaagtccagtttccccaaggaccatcgcaagcaaaaacatttccaccggcagactctttcttcaccatctcgaacgagcagcttgaaccgtcggctccaccggagaagtcgtagtaggaagacaaatccgaagcaacaagaccgatattatcccaattcgttccggtcaaatcaatatatccctcaaacttggtatcatagttgatggaagcaatcttttgcgatttgtccggattgacataatatctttctccttccggtccatagtctccggttttgacgaagtacataaacggcggttcattgtagaccatctcaacaaaatagcttccggtttccatgccgcgtttcaagacaagctcccatctgttgccggtaaaagtcacctcgtcacctacggcaacgttagcctcagccgaggcatctgcaagaacgattgatttcacaacggcctttgtcgaagcctttctgacctcaagggtcaatacattatccagcgtcttgtcttccttcaacctgggcaccgccacatagtccataccctcgaccgacaacaccagagaagataccggagacactatcgtgggattggcaggcagttcttcgctgctgcaagacactccaccaaccaaggtacttaaaagtacccaaaacaaaaatatattctttttcatcttgttcgtttttttaaggttattgtcaatatccggggttctgctttactccggtcataatcattaactggtcattcggtttcggcagcagatagttatggtcgtctatcgttgattccggataccaaggagacaatttctctttcaacagataacggcggcagaggtcgaaccagcggttacattcaaacgccagctcccaatttcgctcgtcaagaaccgcgtcatcaaactgtttcgccgtcaagccggaaagttcgggcaagcctgcccttctgcgaacttcattcagtgcatcataagccttttgcgaagggcttccttctgcaagattggcagcctcggcatatataagcaatatatcagaataacgcaacatgcagtaaaagccatccgcattctgcccgctcccgatgggcgcattgtaatatccgccgcttgcaggaccggcatcgcgcagtttccctacgtagggctgagccgtgtttgtctgctcccacggggttccgtctatcatggtcagataaaaagtacctttcacacggctgccatctcctttaggaaacatatcaaagaagcggctgtcgcttgtccagtcggcccaacctccttcaccattggcatcgggacgagtggcacggaattgataaccgcccgtcctgctgatggaattgccataaagggtgaaaataaattcggaattagtctgtctgttatcatacagccacaagtcgaagaaatgtctctccaacgaataaactttctcattgatgacttctccagccttatcacgtgccagcgcatagcatgaagtgtcgttcaacgggaagcctgccatagtgagatatacctttgccagcaaggactttgccgtccagcttgtgggacgggtacggtcttcccgcttcgaaggcagcgtcgtttccgccgactgcaaatccacaacaatctgtttataaatatcagctatggcagcctgcggttccaccgacgcattcttctgattggcctccgtcagtaaaggaacctcaccaaaccagcggaccaactggaaatagccgaaagcacggaggaatttggcttcgccgtcaatggggctcaactcctctgccgtgagattcgtattctgtgcaaccagttctatcgtagtattacatgcactgatgctcgaataacaattgttccataaaatatccgtcacttcttccggattgcctactgtgttaatgttaacctgctcgaatcctttccatctgactaccggggtacatacatcttcagcaccggcacacgcaacgtagggtgcatcttctccatagagcttgacaaggggggtataagctccggaaatataactgttgaaatcgacaattgtcttaaagaacttgtcagatgtgggctgtccggtcaaatcttccgataaatcggcacatccgcaacagatgctaacggtcatcaatcccactaccattctttttatattcatctttattttcataatatatccttaatttatcagttaaaatgtaatatccaaacccaccaagaagctctttgccgagggatagatgccgcggtctaccccggcagccgtagcgtcggttcccatactggcctcggggtcatatccggtatagttcgttatcgtccaaaggttgttggcacttacataaatgcgggcagcattgaatccaatcttcgacaacagttgccggggcagacgatagcccaaagtgatattcttcaaccgcagataagcacctttttcaacccaacgggaagagttgacatattctgtccccgaaaatgacgggatgtccgtttcgttctcctgtgtccaatgctcttttataaccggattggtaggaaaagcatccgaagaatagacttcacggcgcacacggttctgattataaacatcattacccgctactccctgccagaagatgttcaagtcgaaatcgtaaatggtaaatgtattgttgaagccaaagctccatgtgggttgcgcattgcctatgataccgatgtcttctttatctatttttccatccctgttgagatctgcatatttggcatctcccggcttagcaccatacaaggctgccgtagtcgcttcattctgtttccacactccggcaaaggtgtagcccaggaatgtacccatcggctgtcctaccatctgcacgtaagagcctaccaatccgggaaagtcggcattgctggtgtaaatcatcatatcggaaaggccatccagttccagaattttgttcttattatagttcaccgtatagtttatatcccatttgaagttttttgtcgatacgggaataccaccgaatgtcaagtcaaaaccccgattggataccgcgcctacatttgtcaggatagattctactcccaatgccgtgggcaccttctgccacatcaacaaatcggttgtcttcttcttgtaatactcggcagaaaaactcagcctgccgccccaccaacggctgtcgatacctacattcagctcattcgtacgttcccacttcaggttttcattactcaactgggaaatggcaagggtaggattgttgttggcatccaagccgggagtaaacttcaactgggaggcaaacgacggaacagccgcattgcccaccgttccgtagctggcccttaacttgaattcggggacaacatgacggaatctctccataaaagcctcttccatcaaattccatcctacggaaaaggctgtgaaaccgtcgtatttatgcccttcggccaattggctggcaccgtcgtaacgaacggaagccgacaacatataccgcttctgataactgtaattgacgcgtcccatgaacgactgcatggttgttttggaagtttccgcccaaggctgctgcaagatagaaccaaactgtattccattgtatcccaatcccacggggatgcctttggctgatgctgtcgtgccatcatagctatctttcagcacttcgtaaacaccggttgcctgcacattgtgcttaccgaaagatttgtcgaaagtaaggattgaggtactttgcaatgcaatataattagactgcgttttgcttccgcttacttccgtagtcggaccgttgttcactacctgattgtcgaaatagcctgaagtccggctattggtcttgtatgaaaacaaggtcgaaaatttcaggaaatcccaaaacttatattcacccgtgacagcaacattaaacacggaagcagagttatcatttacaaactccttggcatatcctaccggattgaacgaagtaggccctacaccgcccggctgcgtatagccgccttcgctttcggaatcataaaccttcttggtgggcgaccattgcaatgccgaacttatagcttgttcatattcacctttctgtgatttgttataggaagcaaaggtgttcagtataaagctcaaacgcttgttggcttgtatcttaaaatttgagcggaaagtatattccctgaaatccgtattcaagacaaccccttgcttgtcaacatatccccccgccagaaaataagatataccttcctttccaccgctcacactgacattatgcgtatgggatatggcttctttgaatatttcattctgccaattggttccttctcctaaagcggcaatttcatcctgcataaaaatcggattctgcccgttttcaattctcgcttcattcagcaaagttgcatagtctgtcgcattcagagaaggtaacttcttccttacctggtcaaatgaaacaaatccattataagagatgcgtgctttgctggttgtaccgttcttggttgttacaagaatgacgccattggcacctttagaaccgtatacagacaaggccgctgcatctttcagaacctctatggattgaatctggttaggattcaagctaccgatgtttccatcttgtacaccatcgataatcaccaaagggtcgttgccgtaggtcagagagtttgagccgcgaatacggatagagacagctccagcagggtcaccactggtgttttgtactacaacacccgatacgcgtccctgaagagcctgcgccgtacttgtattgggagcagagagcaattcttctgatttcacggaagatacggaaccggttatatcgctcttcttctgtactccatagcctacaaccacaacttcatcaagcatttccgtatcctctttcaaagtcactcttgccagcgatttatccgttaccttaatatctacggtcttatatccgacataggaaattgaaatcatggcatctccaggcacatccatgagagaatatgtaccatccatatcggtaattcctccattggacgttcctttcaccatgacagtagcgccgataatgggttcaccattgacatctacaacaattccggttattttctttgcagatgaagcgttttgcgtgggtttgcgaataagagcaattacatttccttcctcttgcttgtacgaaagagccgtttttgccagaagctgctgcatagtctggtcaatcgttacatcctgcacattcaacgatactttccggtccaaatccggcaggctctcattgtaaaagaacttatagacactcacctgctctatctgcttcagggcagacctcaacggttgctccttgaagctgattgtgatttgggaataagcactaaaggaaatacttagaaacaatgccagacagacagtccgcactgcgttccgattaccacttctcccgacaaaaaagcggaggagtcttaaaaaggctaacttgtgtttcatacatcaaaacttttataggtttgataagtatacagccacccctatgtcttcgtccaagccgccttccgtttttaactcccgttaacctatttgctttttatcacgatgacagagccgtccatttcgtacgtaaaatcggcagtaagcatcagcatgttcaaagcattccggatgccattgccggggatggttccggtgaaacgttcgttcaaaagcttatccgactcaaagcgtatctctacattataaatgcgcgaaagagtactcatgatattcttcaacgattctttgtcgaaatacagatttccctttatccactcaatgtaatcttcggaattcacttttgtggtagtcagcttttgggtaagcttattgtattccagcttgtcgccgggaatcatggtgtgcgacattccttgggcgtacacccctactttaccttcttgcaacacaacaacgatgtcctcgtcgtcttcgtaagccgaaacattaaaagaagttcccagaactttcacttccagctcaccgacttgcactatgaaagtacgactttcatcatgagcaaccttaaaaaaagcttctccattgagttgcacacacctgttttttttaccaaaatcattcaaataactcatttgagatgctgaattcagaacaacattcgtcccatccggcaactcaatccttgccttgtcacccttatcggccttcacaacgaaaggcattccgggtgtttgcgacatgtctatcaagtaataagtgaagaaagcgaggcaaacgggcagacaaatcatggcagcccatctcagaatattcatacggataacccgcgcagagcgtgacttgccaaccgtctcttccttgatacggacaaacatcttgttgcgcaatgcagaatcaatctctgcatccgatttggcgaattcctcctcccaccagttttgcaggtggcagtcgttcttcatccagtccattagttttctatactgtgccttatccatctttttgttatttaaaagtatacactttcatcccgcttattatccaaaatcccttgtcacatttacacttcattaacaaagaatacaaataaaagggcaagaacagcgtcgtaattctgcattaactgcgtgcgcatgaattttacggcaagagacaactgtgtagcaaccgtactctcggatattcccaattgttctgctatctccttattggtgtaatgctgccttttgctcaggatgaatatctttttgcgttgttcgggaagcttgtctgccaatgagtctatgtactcatgcagaaagtgcaggtcgatgccttcttccgtctggaaatcacggtctataccgcttttcatcaagtactcattataaacaaactccaccatctgcctttgatacatattcatcagcagattcttggcaatggtgcagaggaaagatatgaatgatgattccgggtccactgttccacgaacctcccatatacggataaaggtggactgcaccacttcttcagccatataccggttgcccgcggaaatacgcatgatgaagttatacagcttaccgctatatctgtgatagagcttctcgaatgcctggaaagagcctgcacccaattcggccaataagcgtttttcatctgtagaatcgaccatatccttagatttttgcaacaaaagcatatcctttacggacataaagagatggcaatattatcaatattttcgcaaataaaggcagataaaaggaaatattatgtgaaaaaagaattcaaagtgattttggtgcggcaggaacttcatactttttgagtgtttttaaatgaaagacaactccacattctgaaaatcaaaaggatgtttgttttccaaaacacatttgttatctaagtttgccctaaatacacaaactatgagaattatagccaggagcatttgggaagtacagcaaatcaaatcccataaaagaggcatcgctatgatgcctcgaattttagttgcaaactccccttattctattcatttgccgatgtaaggatagaattaagctgctttggcaatgtgctatgcttcttcttcattccgcgcattccacacaaacaaagccagcaatgtagatagcaatgccgcccctatccagaaccagttgatgtaggtaaagtcgtacacctccacgccatccaccaactgcttgttcccttctatcagcacgccgctcattacgtcttgcaatcctgcacctatatagctggctatacctacaacgcccaatgctgcgcccgaagcattgcgcggagcaatatctacagccatcagccctccgagaaagcaaatcagcacaccgatgccaaggccgaaaagtatcatggccaaagcgtccacccagaaatgaacaccgggaaccagcaggaacaagcagagtgcaaccacattcatcagtccgaagataagggcgggcacattacggcggccgccgaacagcttgtccgaaatgacaccggaaaacatcgtacccacaatgccacagaccgaactgatggaaatgatgaaactggcatccagtgtagaatagcccttctgcgcttccagatagaatacgccccaactgttcaccgcataacggctgatatacataaaagcactactgagtgccaatatccagatggcaggattgcgaagtacggctttctgcgcacggctgaattcctcgctttccaacacactcatttttttcttcgccttaggcatattgacaatgggcaaccctttgctttgcggtgtatcgtggaagaaacgccaggcaatcaatgcacctgccagccccacaagtcctgctccaaagaaaccataccgccagccgaaagcactgacaatggaggcaatgatgataaatgtcatcgcctcgccgatgttgtggctcgcactccagaagccgtagaaagaaccgcgctgtttgtcggtgaaccagcgtgacaagcctaccacgcaagaagcggcccccatcgactggaaccagccactgatgccccaaaggatggcaaacaagatgaatgaatggacaaagccgagacaaaggttcaccaatgccgtgaccaagagtccggtagtcatgaaacggttgatgttgctgcggtcggccaggaaaccgtttgtaaacttacctatggcataagtgaagaaaagtacggaaccgataatacccagttctgtttcggagaaaataccttcctccactatcggtttcttcactacattcaagctgagacggcatacataatacatgccgtagccaagcgttgccgcaagaaaagtagaccattgcagccgcttcaagcgccgttgacaggcggacacagaaaggtcggtacaaggtttatcggaagaaaccttgtagaaatttataagatgtttcaacattgtattttgttattggatttaagtttcgcaagctcaatcgcaaccatccggcggatgtatagcgaggaaaggagatattccgtcgctacactccgctgaatgacagagattactgaatataaatttgtattatgccagagcctttgcaaccaagcttgcggaactcgaacggatagtgaaccaaattgctttattcgtgcatttttttcgttctcagatactccagcaaataagccggacggtcagtctgtaggatgcggcatcccaatgtgtcaatcaaatagccatagccctcatcggggttttgcaaagacatgtcatcgtcgtgtccgcctgccatcgtatcccacaaagtgttgtaccagataagggagcggtcggctaaagtcgttgccagcttcttgggaagcgggttggagtcctttacatacagcagttcaaaagctacgggagacatctccttgacaaacgtctctatctgttcctcggcccccggcttgtcgaggtcgacaatgggcatatagattacgtcattcagataatcgccgaattgtttcttgacttcggctgctgttttgcgccctttcattataatctgcttggtggttccggtcttcttcatcagctcataaatctggtcgaaatagaggtcggcctggtccagatttatcattatcttgcctttggcatgcagcaaggcctcttccaaagtaggaactttgtggatggtacgtatgttgcagccgtttttcaacttcaacccacgtatgtagtcgagagtggcttccgaaaccagccccttgccggtggttgtgcggtccagtgcccggtcgtgcatcagtatcagttcaccatcctttgtcttctttacatccagttccacaatatccacacccattctaacggcattgtctattgcctctaaagagttttccggaaaattgcgccagtcgccgcgatgggctaccacaattactgaactctggtcgcgattcatcagtttttcacgaatctgcgtcactcggtcttgagccgaaagctgcaatactgccaaaacagcaaacagcaataaatatatctttttcatcatttcatggattataaattcaatcattccaatgcatagccttcgttctgccaaccggctttgtcattgacattctctatttcggtttgaggaaccggatagagctgccggtaagcatcaataccgggaaatatggcagccatttgtccggtgcgaacaatgtcgaaccaacggtcgcactccagagcaagctccaaacggcgttccttatatactgcctggcggaagagtgtttttgtggacagttcggccaatgttttcccttcaagacctgcatttgtgcgtacggcattcagagcatccaaagcatcttgtgtaggaacagcggcaagctcattggcagcttcggcatacatcagcatcacttcggcacaacgcattaccggaaagtcggcactggtctcattgttcgttgccggagcattgaacttgcccggacgctgtccgctgcccgtaggttctaccagggccttacggttatccttgtcgctttcaaactccgcttgctccaatgagatgatattgccattgtcattgttacgatagcggttgttctgatgtaccgactcgcctactccacctttcagatattgaacggcaaaaataatgtccttgctcgtcttcaagtcgttgggaaaagtttgcggcatgggcaccagcatcaagtcttttccggcatgaatggctgctaccaccggagcaagttcattgaccacttcctgatagttcttcctatataaataaacctttgccagcaatgcatgcgccgcatacgaagtggcacggcctctttccgattcgggccaaaccgcgggtaaacctttggctacagccaagtcgctgattatctgcccatagacttcatcaatgggagtacgcttgttgttacgcgcttcggccacggtctgcgtttttgtaatgatgggcacctcgccccacaagcgaaccaggttaaagtaacaaagagcacgtataaacgaagcttgtccggcaatgcgagagcgctgttcgtcggacatcggcacttcttccacattctgcaacaccaggttgcaacgataaatagtcttgtacaacgaaagccatgcccccgacaagttggagtttgccggagtttccgtgaaaacttctatctgataagtgatgccgccactggcaccggaattgtcattcttcacattgtcaccacgtacttccatcaaagtcatgaacttcgctccatactggtcgctggattgcaactcatcatagatacctataacggctccttccaaacccttcacatccttataaaaggtttcctccgtaggaaaatcaataggtttcaagtctataaaatcactacagcttgaaagaaccattgctgtaagaacaaacattattacttttttcatattactgtctttttaagattaaaacgtaagattaacacctatcgaagtggttcttgccaacgggtatacaccatagtcttcgccattggtagtagcggcactgcgatttgaaacttccggattatagccttcatagttggtaaaggtaaacggattttggatggaacagtatacgcgcgccgacttcagatacacctttttgagccagttttcgggcaaggtatatcccaacgaaatattcttgatgcgcaggtaagacccgtcttccacgtgccatgtagaggtggtgccgttctgccccttactgacgcggttggcacgtacattcattccactaccaggattgtcttccgacttccagcggttcaaagctcctttgtagttattcatattcccttcgtggttatagaaataccggcgagacaagttcaggatttcattgccctgcacaccttgaaacacaatgccgaagtcaatgcctttccaagccagtgtagcaccgaagccataagtaaagtcgggcatatagttgcccacgatggcgcggtcggtatccgaaatatcaagtatcccgtctccattgacgtccttgaacttgaagtcgcccggcttcgtgtcggccagtccgtagttggtgggagaatccttgtagtgcaaagctgcatccacttcggcctgattcttatagacaccttctaccactggaagataatagcttccgatggcctcacccacgcgggttatgaaataggcattgctcaccgaaccggaagaaataatatcggcattgcccggtccaagttctttcacttcgttgatgttcttcgagatattgaagtaaacactccagttgaaatcgcccatcttctgattggtggcgatattgaattccacacctttgttgttcaccttgccgatgttctcgaggcgagtgttgtaaccggttgtcatgggtacggggacattgagcaacaagtcatacgtgttactgttatataaatccagccccaaagtcaaacggttactgaacagcgacgcatcgaaacctacattcacctgcgctgtcttttcccaatgcagttcgggattgggcatgctcttgggggccgcaccctttattacttcggcattgcttccgcccaacacataactataataggcaacttcgccttgtgcaccatagttgggaatacggaagttacccgtcagaccgtagctggcgcgaagtttcaagtcgtcgatgaaagtcagcgacttcataaattgctcttccgtcagacgccatccggcagataccgacggaaaccatccccaacggttctgtttgccaaaacgggaagcaccgtcggcacggattgctcctgtaagcatgtacttgcctttatagttatactgaattctggcaagtcctgaaagcaaggcccattcggaagcatgcgaattgccgcgggtaacggtacctgcattgagagtgggcacgctgttcgtaatgaatccgttggcaaaagcataagtactttcgtctcgttggtattgcatggtccagcctaccagtgcagaaagagaatgcccgtggatttccttattatagctcatcgtttgctcaaacagccagttgtacatcttggcagtcttcgccgttgcttcgggcaccgactccggatttccctccgtattggaaatggggatagtggacggacggaacgtatcttgcgagctactgtaaatatccacaccgaaattggcccgatacttcaattcgggcataaaagccacttctccgtaaatattgccaaaaacacgggatgccttcgtttcgtccttctgcaacatggctaatgctacgggattccatacttgcgtctggctgttacctttctttatggaaccgttttcgagtactgtctgtgtattgggactccaggcattctgagagaagcaaaatgaaccgtcgggattataaaccggaaatataggagcactgtgcagcgccgaagcaatgataccgccaccgcccgaattgtaagcgccgtcagaattaaccgcattctctatcgttacagacggattgagcgaaaggccgaacttgaaaataccttcggttacatcgaggttgaagcgcgagctgtagcgcgtaaagtcactgttgataatgacaccttcttgtgacaaataatctacagacgcataatatcttatcttcgggctgccgcctgagacagaaaccgaatggctctgcatgcctgccgtacggaagatttcgtcctgccagtccgtgtctaccagtcctttttcacctctcaggtatggcaagatttcaacgggaacaattgtattataatcattgcttgtattttgcagacggatggcattgctgtccgagatgtcaaaagacaaaggattcttattctgcgctatgagcttacggttgatggactccatcttgtcggtatacgtattgttgcgtgcatcgttcaccaaatcggcatactcgtaggcattcagcatgtctatcttctttgaaaccgtctgccagccatagtatccgttataggaaactgtagcacgcccttcctgccctctcttggtagtaatcagtaccacaccgttcgaaccacgcgaaccgtagatggcagccgaagaagcatctttcagcacctcgatggactctacatcgttcatattgaacgtattcagctgctcctgggcaagaggcacaccgtccacaacatagagcggagaggttcctgccgtaatagtgcccgttccgcgtaccttaatctgcaaggaagagcccggagcacccgtcgactgagacacctgcacacccggcatcttgcccaccatcgcctcggccatggaagtaaccggttggcctttcatatcactggcacgaaggctggcaatggcagtagtcacgtcgcgcttcttctgcacaccatatcccacaaccactacttcgtccagcaactcgttgtcttccatcaagacgattctgtccaggcctttgccgcccgcttttatctctaccgtctgatagccgatatatgaaaaggcgagcatcgcattcccgggtacatcggccaggctataatttccgtcaagatcggtaatcactccattggcagtgccctttaccaatacactggcaccgataatcggctccccgtttgggtctaccacttttccgttgattgtctttgtcctcactttctcaataagctctccacttttctgattgcctacggatattgtattgttgtccctattgaaatataattttgcttgcgaggtaatctgctccaagacctcttgcaaagaagcgttggaaacatggatggagatgcgtggagctgcattgactatttcttggtcatagaagaatttcaaaccagtctgcacgcccagttggttgaacacattctctaccgtttcattctgaacattcagtgtaatgcttcttgtctcttgtgcccgcacgtatggggctgtaaacaacaagcatacgaacagtaaaaaagctaaaaatgaatctacatttctacatttcctttcagtattaggaagattattcataaatttgtgcgttttagtaattgaaataaattattaaaaacaaagatgtgtaatgcgcgatacgttattcacacgggtcgaaacgaatgaatatccgtccggattaccggaataggggcttctcttagagacagctcctatttttttgtgtagctcaagttggtggtttcatacttaattttattaatgataaaggttaacactctggcgattcgcttatatatagtacacagtcgcccgaagaagcaggggtctcattaagatattttcactatttatgcgaagcagtgattgaattatattcatatttgataagaaaggaacctaagtgattagcagtactatctcaattgagggtgtgtcgaaatagagacttagaacacaaattacgcaaattatacaaatcatgctttttaatgactactgataatcagggattatccgagtcgcttatttgcgtaatttgtgtaattcgtgttcccttatcacttctgacacaccttctacccgtagggggaggtggtaggtaaaacaataaacacctatgaatcataagaataaggttttctttcctcacctaccaccccgccctttgggcacccctccttcttgaaggaggggaattgagatagtacttttaactcataagcgtttctgaaacagttcataactgataagaaagaaataatccgtgcttgagtaacaagagtttcttcaacttgctctcaccaccctcaccgttttcctgaacctccctgttcatcggtgtttcggaggtgagtatctttctgccccgtcatttgtagggaaagcatcggtgtttcttacgaaaaatgcagtgaattgatagtgtgttcactatagtggtctgtcttcttcacgatagtgaacaattcgggccatcttagtgaacatacttgttcacttaagtggagcgtcaacaaactcaaagacttttcaggagaaacgtatgtgcgaaacacaatgaatgcctgcacagtacactacaaacgcctttcaaatacccttcaaacggacagcaccaagcccctttttctatattggcctgagttcgatataaggctttgcttataactgtataatagcgagtcaaattcaactcctgattcacactatttatagagcaataccttgttcccatctttcttataatgaatgccgctggtatattcgatagactgcaacacagcttccaggctcttgttgtcgtgctcgcccgaaatcagattcttgaacacctgcccttcggcaaaagagatggagcaattataaacgcgttccaactcttttgcaacatcgtttatctgagtactgctgaatcgcaatccgcctttccgccatactgccacagtgcgtttttcatgctgcttgttgtattcgccggaaatggtattgatgtacacccgctcctgggcgcttaagcgcatcatggcttctggcaagtccacttgcaccttgccactctccacatcgacagaaacaacctcatcggacaaataagctttgatatcaaagcacgtgcccaatacacgaacgtcgaaatgatgggtattgacaatgaacggctgcttctcgttgcgatgaacccgaaagtagccctcaccttcgagctccaccctgcgttcgttgcccgcaaagcggtcgggatagcgaatgcgggagcaggagttcaagaccagttgcgtgccgtcaggaagcaacacctgcttgcattcgccataagaggtcgaggcttctagataagaaatctgctgttcgttgatgtaatccagatatccgacgccacccagcaccaaacaaagaaccgcagccgcagctgcagcgacagttgccatgcggcgaaaccaggtccgttttttgtgctcgatgcgcttcaacaattggcgcgcctctttcttcgacttctcgcgttcgaggtcagtcagcggttgttgcgacgctgattcgtcccaaacatcggcagccagttcctcaaggatgccttccggttccggcacagccaagtggtctgccaacttgctgacatcttcaaccgtgtacaagtcatccaagtaacggcgaagcaaagtcttatctttctcgttatgtttcataatcgtttttttgcggggagctacaaagatgttcttaaactatcccttttaaaagaatagtacacgcaaaagcgaagcatctagggtgtatttaacgttttttatctcatacggaagaaagatgggcttcattacaaattcatacaaacaagaagcagcacgaggtcggcagccgctaccgagttcttctgcaaatatccgcgcagcgatttcaatgacaaggatatagactcctgcaccgtattgaccgatatacccagcgtttcagcaatctccttgtgagacatctgctgttcacggctcatttcaaagatttcacgctggcggggcgtcaattgctgcaatgcacgcaagattagttgccgcaagtcattagctagaatttcattcttcgtttcatcggtataatccacagcctgcgcaaggacatgctccttgagtttgttctggttatcgaggtcgcgcagctgattcagcacacggttgcgaacaattgtataaaggtaggaagagaaggaagcatcgggattgatgaaacgtcggctctgccaaatcacggtgaaagcgtcctgaaaaacatcctcggcatgctcgcgcgacttcagaaaacgcatggcaaagtatatcaggcggcccttataggcagcgtacagttcacaaaaagcatcctcatctccatctatcaggcggagaacaagtgccttttcatcaattagagtttctgctgcatacatagggctatctttacattcaagtacaaaggtatcgctaagatgttgcaaacgtatgtaaaattcgggaaagaaaaaagaaaaccttaattccgcaacactattacaaatataactttttaagtacctgagcaacaaaaagttgctcaggaatttgccatgtcagatttttcacctatcttagtgttgcaaatcaaaatatgtatcaaacccgacagacatggcaaaggtagcaattaaatccgagaaactcactccttttggaggaatattttcaataatggagcaatttgactccagactctcatctgtaatcgactcaaccctcggtatgagatgcaggctgtatggttatcaatacagcgaaatcatccgttcgcttatgagcgtttatttttgtggcggctcatgcatcgaggatgtcaccactcatctgatgtaccacctttcgcttcatccgacacttcgcacatgcagtgccgacacgattcttagagccataaaggaactgacccaggataacatttcctacacatccgacactggcaagacctacgacttcaacacggcagacaagctgaatacactgctcctcaattgcctattgtccacagggcagctgaaagagggcgaggggtatgacgttgacttcgaccaccagttcatagaggctgagaagtttgatgcgaagcctacatacaagaagttccttggttatcgccctggcgtggcggttattggcaacttgattgtcggcattgagaacagcgacggcaacacaaatgtccgtttccaccagaaggacacgctgaagaggttctttgaaaggtttgaacaaaacaagcttattatcaaccgtttcagagctgattgcggctcgtgttctgaagagatagtggaagagattgctaaacactgcaagaccttctatatccgtgctaaccgatgcagttcgctctacaatgacatctttgccctcagaggttggaagaaagtggaattgggcggcattgagtttgagctggcctccattctcatcgagaaatggaaagggaaggcataccgtcttgtgattcaaagacagaagcggatagacggcgaactcgacctgtgggaaggagaatacacctaccgctgcatccttacaaatgactacgagtcttccgagaaagagattgtcgaattctataacctccgtggagggaaggaacgcatcttcgatgatatgaataacggattcggctggaacaggcttccaaaatcctttatgggagaaaacacggtgtttcttctgcttatggcactcatacgcaacttctataaattcatcatggcgaggcttgacgtgaagaggttcggactcaaagcaacaagccgcatcaagacgtttgtctttaagttcatctctgtgccagccaaatgggtcaggacatcaaggaagtatgtgctgaatatctattcatgcaacaatgcttatgccaatgtgttccagaatgactttggataacaccgacaacttatagtcgtgattttgcgtattgcctcaagtcgcatggtggggtaaggggcatttatatgtctttatggtgacattcgatgcactgtgccccctttttactaacgatgcagattcttttcgcttctgtatcatattaggcgcgtagttgcggatttgagggaaaaatgaaaaataaagccggttcatccctcaagcaatgaccggctttaacacgcttctatcgtctataggctttcagtttattcctataataagcctccacatccttccaatggtaataaggagccagttcgctttctaccggaagtttcatctcatgctcgttgagcagcacctttacaagaatgtcatcactgcctttcttgcggaagaaaacgaattgaacgttgcctgccatcgggaaaatcttgtagtttcgccaagtttcatcgagtctgcttaaatcggtagtctgataagcacaatcacccaattccagcaggcataccaaaggaagcaggcaagattcatggccgaaacgtaaagttgcgctgttctctttcttcacgatgcaagtgtcggccgtattcagtatattttccagcagattggattccatataaggtatttcgcttttggtgagcggagacgggccataggatatataccaattcttgttgctgatttgccacaaatcatagcattcgtctttggtgaagagagagtaaagttccagattcgtgtcgagactctgcatgttgcttgccacatcaaacaaccgggtcatcaatctgccggcatccactttccagtttacataatcctcgttgttgaacaaagccttcatcaagcgttccggatgtacatgctccttccggatggcagccttcgcctcgaccacttcatccgccttgcacaatgtcttgacataggggtcatcgttattcatatagtacatgtcggcatagctggcatcgttcttgaactgcaacttcggattgagagattgcagcttcaaacattctgccgccatagaaagaatgcagcggataaccaccgtggagcatgcatccacctcggcttctcctttaaagacttccgggaaattcttgtacattcgctctgcaatgcctttgtgctggcgtgcacccagcggagtcagttcgccatatctgctcttagccatgcgcgagacgctatccaaaacacaaagtgtcttctttcccaactcagtgagcacaccattctcatcagcctcacgcatcactgccaacggcttctcgtaatcatccggatttataaggaaccgtgaaccatgacgggcatagtggctcagataaaagggtttataacctgcaggaggagctgtctgctccacagtcggttcgggataggcatagtaattggctgccgaacgatgaacatctgcaaagatttcttctttggctgtctgggctctcattccaagcaccaggcaacaaagaacggttagaaaaacgaaacgcttcatagatactactcttttatgatttattcatgtgaaatctctttcaggtattcttctatctttccgaagaaggatgccaagtgcgaaccatcaacaaaagaatgatccacatagatggaaagtggaaataccagacgcccttcacgggtcaccgtttttccggcagtcatcaaagggtggctgcaagcattcccggcttcggcaagcgtataagtggtagaggtgaaatacatcttagggacagcgctcaaatgcactacatcgtaatcgccttgctgcgcgagatgcttctcggctccataaggatcgccatcttcgggaatattggtaatcaaagcataggcttcggcataaaagcggttgaaatcttcgtgataaggtatgcgtattgtatagaaagtcttaccgggaacggctatcggagaaatgatatccacccgatcgtgaaagacgacctgtccattcttgtctttacggaaacgaagttcatccacctcgtttgccgaacggagcacggcataaagatagtaaaggaaaaaagagcgtcccgctgctctggcagccagacttgcctctgtacaatcaatctctgtagtaatggaataccaggagctaacaaagttgcggaaaaagttgtagttatcccggcgttcccaagtttcaatgtctataatctgtttcatatacaaaaaagggggttagaaaaaaggatgccactttacgggcatcctttctatattcagtttatttttctttcttataattctccaatccagtctgcaagaactcgatatatttgggaatatcttcgtcgtaggagtaagacttattgagcggtttgccttcgttgtcaatcaacacatagaagggctgcgcattggcaccaaacttgacgcgctgcagataactccacttgtcgcctacggtacgtagcgtacgttccgtgccgttctccacaatcttcacgggagaaggaagcggtgtcttgttgtcgacgtaaagcgtgataagtacatagtcgttgttgataatgtcactcaccttcgggtttgtccatacggcaagctccatcttacggcagttcacgcaaccgtaaccggtgaagtcgagcatcacgggcttgccatgctggcgggcatactccataccgaggtcgtaatcgtcgaacttggcatgcacttcattattgtaaagattgaaatcctgcgtctgcatgggcggcgcaaaggcactgaccgccttcaacggcgctccccacaaaccgggaaccatatacaccgcaaatgccagcgaggccaacgccatgaagaaacggggcacgctgaccttcgtatcgtcatcatcgtgcgggaacttgattttgcccagcaggtagaagcccagcagcacaaaaagcacaatccacaaggcgaggaacgtctcacggtcgaggatgcgccagccgtaagccaaatcggccaccgaaaggaattttagagcaaaggccagctccaggaagccgagcgtcaccttgatgatgttcatccatccaccggacttgggcatggacttcagccaggacgggaacagggcaaacagcgtgaaaggcaatgccaaggctatggcaaagcccagcatgccgatggcgggagccaccacgctgcccgtcgtggaaacctgcaccagcaggaatccgataatgggtcccgtgcaggagaaagataccagcgacaaggtaaatgccatcaggaagatgctgagcaaaccgcttgtcgcctcggccttgctgtctacagccgtactccacttggagggcaacgttatctcgaacgctccgaagaaggaagccgcaaacaccaccagcatcaggcagaaaaggatattgaatactgcattcgtagagagtgcgttcagtgcgctggctccgaaaacaagcgtgattgccagtccgagcgtcacataaatcaccacgatggaagcgccatacgtccacgcatcgcggatgcccttcttcttgtccttgctgcgtttcaggaagaagctgaccgtcatcgggatgatgggccatacacagggggtgaagagcgccagcagtccgccggcaaatcccgtaatgaaaatataaacccaggacatgtcttcctgcgaagtggtttcgcccaaagaattcagttcactgatgactggcttccataggtccaccttgtccgccaccttgatttccgtcggcccgtccgcaccgccgatggcagccacgggagccgtgccggagacagtctcctgctttgcgggctgttcttcggctttcgtttcagcggcagcggcggcagcttctttggcagccccttctgccttgccggagaacttgaaaggaacttgtgtgggcggcaggcagttttcatcgttgcaagcgccatattccagatagccttctatctgataagcgccacccgtcaacttcagcttctgcacaaattgcgccgtattctcaaaatagcgcaccttcatttcgaacaacttatcgaaagtagagatttccttgcctacgggcttcagtttacccaccacttccgctccggagattttctccacattgaaagtcgccgagataggccctccatcgcccaagtcggtggaatagacatgccagcccttgtcaatagcagccgtaaaaacgacctccgcttcatcagcagccacagtcttcagttcggacttgaacttgacgggatcttgtatctgtgcccgcatcgccaccgtgaaaagcaacagaaatagagggaacaataatttcttcatgttctctgatttaatttttaatttttaattttcaattatctcgtagtccacgcaggcacggctctctttcacagcagcgataagcttgccggcagctacatggtcgggatgggtagcatagtatttcacgtcatccaacgtatcgaactcactgtaaagagcgatgttccaagcctcggcaggattgatgttcaatccgacttcaatcttgcggataacggatattttagccggaagcgcttcgatagctgccttgaaactgttcatcgcagccaacttttcgtcagccggtgcctcatcttttaacttaaataatacaatgtgctttaccataactttgccatttaaatgatttatcactatatttgtcagcctaagcggctgttttaacaactgcaaaaatactggttttgtttcaaatatacacttaaacggatgttaataataggaattgcaggcggaaccggctcgggaaagaccaccgtcgtacgtaaaattatcgaaagcctaccggctggtgaagtggtattgttgccacaagactcttactacaaggacagcagccatgtgcccgtggaagaacggcagaacatcaacttcgaccaccccgacgctttcgagtggagccttctttccaggcatgtcgccatgctgcgcgaaggaagaagcatagaacagcccacctactcatacctgacgtgtacccggcagcccgaaaccatccatatcgagccccgggaagtcatcatcatagaaggtatccttgccttgtgcgacaagaaactgcgaagcatgatggacctcaagatatttgtagacgctgaccccgacgaacgcctaattcgtgtaatccagcgcgatgtagtggaacgcggacgtacggccgaagccgttatggaacgctatacacgtatactgaaacccatgcaccagcaattcatagagccctgcaaacgatacgccgacctcattgtgccggaaggcggaaacaaccaggtggccattgatatattgaccatgtacatcaagaagcacttggggagttaatttgtaatggagaattgataatggaggattaagaacgcactaaaccctatgagatatgaacagcctgttttctttcgccagacataaatcatccattatcaattctcccgtcccaattatcttgctgttgttgttgtgctgcatcgcaggatgccgtggaggacatcctgccgaaaaagaagaagcggatgacctgcaacagataaaggacagcggagaactggtcgtattgacactgtacagctccacttcctacttcatctaccgtggccaggacatgggattccagtatgagctgagcgaacagtttgccaagagcctgggagtgaagctgagaatagaggtagcccggaatgtgcacgaactcatagagaagttgctggcaggcaagggagacctcattgcctacaaccttcccatcaccaaggaatggaaagacagcctgctttattgcggcgaagaggtcatcacgcaccaagtcatcgtgcaacgtaacggcggacgcaccaaaccactgaaagacgtaacggaactcatcgggaaagatgtatatgtgaagcccggaaaatattatgaacggctggtcaatctggacgaagagctcggaggaggtatccacatccataaagtgaccaacgacagtatcagtgcagaagacctcatcacccaggtggcacaaggaaaaatcccctataccgtagcagacaatgatgtggcacagcttaataccacctattaccccaacctaaatatcggactctccatcagctttgaccagcgtgcatcgtgggcagtccggaaagactgtccgcaactggcagccaccgccaacaaatggcatgaggagaatatgacttcacctgcctatacagcaagtatgaaacgatattttgaaatcggcaaggccattccccactctcctatcctctccctgcgcgaaggaaaaatttcccattacgatgatttgttcaagaaatatgctcccgaaatagactgggactggcgtctgctggcgtctctggcgtatacagaatccaacttcgactccactgccgtatcttgggcgggtgccagggggctgatgcaactgatgcctgccacagccagggctatggggctacccgaaggaaaggaacagaaccctgaagagagcataaaggctgccgtgaaatacataggcgccacagccaaaagtttttccaagataccccaggaagaacgcatcaactttgtgctggcatcttataattccggtatcggccatgtgctggatgccatggcactggccgaaaaatacggcaaaaacaaatatgtctggcgtgataatgtagaaaacttcattctgctaaaaagcaatgaggaatacttcaccgaccccgtctgcaaaaacggctatttccgtggcatcgaaacttataacttcgtaagggatattacgtcacgcttcgagcaatacaagaaaaagataaaaaaatagggattaaggattaatccctaatccttattttccttcctatttaaaacagattcagtttgttctttctcgcttcttccagggaaacggttgtcacttgtttctcccggttcttttcgcacaactgccgatacttctcatgcagttcttcttccagctcctcctttgtcttaggattcatcagcttggctgctactgtagcattctgtgaagcgtccttcagatggattacgggagcatgatagaccggagcaattttcagagctgtgtgaagcggtgaagtcgtggcaccacctatcagcagaggaacgtccagacctgccttttccagctcaatggctacatgcaccatttcatccagcgaaggggttatcaagccactcaatcctatcatgtctaccttttcctctatggcatgctgtacaatggtttcggcaggcaccatgacgccaaggtccactatatcgtacccgttgcaggccattactaccgagactatatttttgccaatgtcgtgcacatcacctttcaccgtagccagtagtaccttcccggcagcagtcgcaccttcttctttctccgactcgattacgggctggaggatggcaaccgccctcttcatggtgcgcgccgtcttcactacttgcggcaggaacatcttgcctgccccaaacaagtcgccgacatgattcatgcctgccatcaacggaccttcaatgatagaaacagctttgggatacagcttcaacgcttcggcaaggtcttcttccagataatcgccgataccctttgtcaaggcgtacttcaaccgttcttccacaggagtcccctctctccaggcaagttgggaatgggcggcagcctgccgctctcctccagaagtttttgccgcctctgcttccgctttcaagcgttcggcagtttctatcaggcgctcggcagcatcgggacgacggttcaagaccacatcctctatgcgctccaatatatcagcgggaatatcggtgtaaagaacggaggcagccggattgacgatacccatatccatgccctcgcggatggcatagtaaaggaatacggcatgcatcgcctcgcgaatgtaattattgccgcggaaagagaaggaaaggttactcactcctccactgacatgcgcaccgggcagattcttgcgtatccatccggtggcacggataaagtctacagcataattgttgtgctcgtccataccggttgccacggcaagtacattcgggtcgaaaattatatcatggggattgaaacctatcttgtccaccaaaagacggtatgcccgttcgcagacctcaatcttacgttcgtacgtgtctgcctgccctttttcatcaaaagccatcaccacggtcgccgcaccatattgcttgatggtacgcgcatgctccaggaatttatcttccccctccttcaaggagatggagttgacgatggacttgccttgcaagcatttcaatccggccacaatcacttcccacttagaggagtctatcatgacgggaacacgggcaatctccggttccgaagctatcagatggaggaaagtcgtcatctccacttgagcatccagcagtccgtcgtccatatttatatcgatgacctgcgcaccgtcttccacctgctggcgggcaatgctgagcgcctcgtcatatttcttttcattaatcagacgcaagaatttgcgcgaacccgcaacattacagcgttcacccacattcacgaagttattttccggcttcacttccagaagttcaagcccggagagccaaagattttccggtctgggaaccggctgatggggcgttgcaccggcaatcagcgaggagtactcggcaatgtaggcatctgtcgttccgcaacaaccaccgataatattcaccaatccctcatggatatactcttttacttcatgtgccatatcggcaggagtctggtcgtatgtgcccaaactgttgggcagtccggcgttgggataagcactgatataataaggtgcacgggcagcaagctgctccaggaaaggtttcagctggcgggcgccaaaggagcagttcaacccaactgaaaaaatatcgacatgttgcacggaggcgagaaaagcatccaaagtttgtcccgacagagtacgccctccaatatcagaaacagtcacagagagcatcaagggtacatgaactcctacagtttccatcgcctgccctgcggcaaaaatagcagccttggcattcagcgtatcaaaaatagtttctaccagcaaagcatccacacccccttcgagcaacgcttccatctgctcacggtaggcatcggcaagttcatcgtagctcaaggcacgaaaggccggattgttcacatcgggactcatggagcaggtcttgttcgtcggtcctacggagcctgccacaaaacggggtttgtcgggagtaagagaagtaaactcatctgccactttgcgtgccaggcgcactgcggcaagattcatctcacgcacatagtcctgcacatgataatcggccatactgacgcgggtggaactgaatgtatttgtttcgataatatctgcacctgccgccagatacttgcggtgaatgtcttgtatcacatcggggcgtgtcagacaaagcaggtcattgttacctttcatctgtccgggaatctgcgagaagcgttcatcccgaaaatcttcctctgtcaagttgtattgctgtatcatggtgcccattgcaccatccagaataaggatgcgctcacgcaccaaactaccaagtttactcatattatcttttaaacatacgcgccatatcgcgtttgtcatctttttccttcagtgattcgcgcttatcatattgcttcttacctttggcaagtgccaccacaagtttggccagccctttttcattgataaacaagcgcacgggaacaatggtgaaacccggatctttcgtgccgcgcatcagtttttcaagttccttcttattcaacaaaagcttgcgctccctgcgtgcattgtgattgttgtacgaaccatagaagtattcggccacatgcatgttcttcacccacaattcgccgttggcaaagtaacagaacgtatcgactaagcttgctttccccaaccggatggacttgatttctgtgcccgtaagcacaatgccggccgtataggtgtccgtcagttcgtaatcgaacgtagcacgcttattctttatatttacaggagcttgtttcatgacatttatcagtttagcactaccgtcagcttattgaatatccattcaatggccaccggacaagctattaacaaaatagaagaaagaatggtgaaacgcaaacggtctttttccgctatctgcatcacctttttgcttccttcccacactacatacacgatatagaattggagcaacagagccataatgccaaaatcaggcaatatgccgataacaatcctcagcatgaacaccactaccagtgcataacctgcaaactgttgcgccaaaggaatatcactgtccagcataaacatgcggacacgcaacccattgatgagataggctgccaaaaaatatcctccaaacaaggatacagccaccgcacagcattgtgtcatggcatattgaaaactttgcggcccgtcccatcccatcttcatcaaagagccgatgaaaacggacaacccgcataaaccaatcatgggatagacaaaagtagtaaatacttttcgtctatcctctaaactaatttcctcccaggcacgagccggagaggaaatcagtagtattgctatatgaaataaatctttgtaattcaatatcaatttattgattagtagacgcaattttgtattctacagtatattccgtatagttttccggtatttctgtattgctattatttccactttcatgcgacttaataactaatttagtaggaagatttcctgctttttctttaaacctttctaaagcattttttatatcatacccataccaattagaataataaacatctgtcttatcatcagcacccttatcatgacgcagatagaaaacaaggtctgtggcccctgcttcaatttcatccagtacacaagctaaagcaaatttatgcatcttaaacttatcgttgtcattttgcagtctccaagctataggagttacaagtatatccttgttatacaaaaatggctgaactgacccattttccaatttcaaagttatcaccggtgctgtttccggcgcatcaacaaccaagctttctgctgtcattgatacgacagcgtttgcaaaagaaataggctgaaaattcttcaaagtgaagttggtagttttagatttttcattcgtctcaggttctatgctctttcctaagatgattcccattcgagaatctgaaatcttcaaacttgaatttgcctcaaattgagtaacagaagccggtgtaggttgataagtgttacccgcagcatcttcaaaagagagtaatcccatatagttattcactaaaaccatgccataaatgtcatcatactctccgtcatctgaattcagacacgaagtaaacgaaatgcccatcaacaatgtcaaggcaaccatcaagaattttaattgtttcatctttcctataaatattagagtttgcaaatttagataaaagaattgagtaatatagtactctcctcgttttttcattgtttttaagattaaatgaaagattaatctaaatactgcaagccccaatatttatttaacatttataaacaaccataatttagataatcacattattctaaaacatattctcctaccaatttccctgttgttggattatatgttctagcttcaaaagaagaaaagcagtctccactccattttcctttaactctaaacgttttagtatcccctattttccttaatgtagcaacgtaagtcaaactacctttgtacatgactaacaccgcatcaagttttacagtttcacctggttgaatcgggatttgtccagttctcgtttttgttaccgttttactatcacttgtaccataagtccaagatttatttgtctgctgctgtacagaaacatttactccaagcgaagaatcatctcctaccacattaggtatacccacgttcaatcctcctgaaatagtgacacttactccttctgtttttgaaaaatcagatttttctgtatagcttgtagataaagaatagttccatgtatcaacgcttaaatgttcatttgtatattcatcatggtcacaaatcacttctgtaggttcaaagctgtcaaccgtagtccgtacatactctaaaccaacaagttcatattcaccaacaggaactatttcccataaagcgaggcttgaggaattattcgttttaaactttacagaggaagacgttgaagattctgattgcaaataataagaagacaaaccagtattaaagtttccatacatcgtatatatcatacaattagcatcagccaaacaattaaagcttaagccaggtccagccaaaggtgaatcaaaagttgatttattccaataactcaaacgaagattatcaggtatttctgaagataaatagttattaggagtaacaactccatatgtatcggatgtcactctattatttcccccagcaacaacaatagttcttccatacttcagataccatctctgcctcaaagatccatcatctttatctgttaaacaaatttcagtacctttctctttacaagtaagatacttttgtttagagtttccaatattcaaaatattcactggaatttcggcaagctcacttatcggatcaaaatccgcactagaacctatcgcccttgtcatcacctgccccacaccactactttccacaaagttatccaattcctcttgctcacaagaaaatagagctaacactcctaccaataataaactaatctttttcataagcattacattttttagttaacaatatatcataattcaaaacagccatatgcatatgccccattatctcctttaatttctatacaatactcccctgatactccgaaaggaagttgcaaatatttccgaaggggagatagaatattctcggaagaagaataaatcacagaaccattttgggaaatggcaatttccactaccccgattccttccataaaatccaattccacggaataattagaatcttcaacgaatacaacaaatggcactaatggtataacggaacggcttccatcttcttttcccgtagtcagaatttcaaaaggaatatcatttgaatgcaaaaagacttcttcttttccagaagcaatacttatgtcgaccaaaggattagcatcgacctttaataaagaaaataacaacaatacagataagataattttcagtttcatagtctttcattttttatttatacaaaattagggactattcaacaataattcagcaataactatgcggacaaaaatagggtaggtaataaattatatatcaacacactacaaagaaacatataggacaaaaaaacgtttttttctcaatacatcattatcatttgctctaaagaatcattcttagtaagtcctaaatctgcttttagtctttgtctgtttttatatatggatttcatttcacaatcaaaaacaatcattaattgcttgttagagaatcccactttcagcaacgcagccaacaataattcattttttgttaacctcaaatccgcaactacgcgcctaatatgatacagaagcgaaaagaatctgcatcgttagtaaaaagggggcacagtgcatcgaatgtcaccataaagacatataaatgccccttaccccaccatgcgacttgaggcaatacgcaaaatcacgactataagttgtcggtgttatccaaagtcattctggaacacattggcataagcattgttgcatgaatagatattcagcacatacttccttgatgtcctgacccatttggctggcacagagatgaacttaaagacaaacgtcttgatgcggcttgttgctttgagtccgaacctcttcacgtcaagcctcgccatgatgaatttatagaagttgcgtatgagtgccataagcagaagaaacaccgtgttttctcccataaaggattttggaagcctgttccagccgaatccgttattcatatcatcgaagatgcgttccttccctccacggaggttatagaattcgacaatctctttctcggaagactcgtagtcatttgtaaggatgcagcggtaggtgtattctccttcccacaggtcgagttcgccgtctatccgcttctgtctttgaatcacaagacggtatgccttccctttccatttctcgatgagaatggaggccagctcaaactcaatgccgcccaattccactttcttccaacctctgagggcaaagatgtcattgtagagcgaactgcatcggttagcacggatatagaaggtcttgcagtgtttagcaatctcttccactatctcttcagaacacgagccgcaatcagctctgaaacggttgataataagcttgttttgttcaaacctttcaaagaacctcttcagcgtgtccttctggtggaaacggacatttgtgttgccgtcgctgttctcaatgccgacaatcaagttgccaataaccgccacgccagggcgataaccaaggaacttcttgtatgtaggcttcgcatcaaacttctcagcctctatgaactggtggtcgaagtcaacgtcatacccctcgccctctttcagctgccctgtggacaataggcaattgaggagcagtgtattcagcttgtctgccgtgttgaagtcgtaggtcttgccagtgtcggatgtgtaggaaatgttatcctgggtcagttcctttatggctctaagaatcgtgtcggcactgcatgtgcgaagtgtcggatgaagcgaaaggtggtacatcagatgagtggtgacatcctcgatgcatgagccgccacaaaaataaacgctcataagcgaacggatgatttcgctgtattgataaccatacagcctgcatctcataccgagggttgagtcgattacagatgagagtctggagtcaaattgctccattattgaaaatattcctccaaaaggagtgagtttctcggatttaattgctacctttgccatgtctgtcgggtttgatacatattttgatttgcaacactaagataggtgaaaaatctgacatggcaaattcctgagcaactttttgttgctcaggtacttaaaaagttatatttgtaatagtgttgcggaattaagggttaaatcaaactcttgtttaagtcgagtaataaaattcgcatgaaccaaatccagaaagtcaaatatatgttgccgttcagcaatagtcatattactaataatcaaatttccttgcttcaattcctctaatacaaacaaggcgtcaacactcgaattctcacatactcgcttattttctgctattaaacaaaggatttttctattcaggattcctatttcctcttttttagcctgacgttcttgtaagctcacattctccaattctgcaattctacaagcatatctattaataattgcattattatttccaataatctcgacattacgcaacaattttgttcgataccttttcctaaccagaaagaaagcgatgatgcccaaccctaatatgaatacaaataaaaacaaataaaaataagtctgtttctcattttccagccttatctgtttattttccaaaataagcttatcattttcatacttattctgcaaatccaacaactgcttttgcagttcagcattacgagtcacctctaataatgaatcagacttctctttatacaaaaacgctttcaaataattaccatcttttttatgcatatcagccaaatagtaatatgcacccgaagacacaaaaatattagttgcattgatacaagaaacaaaacaatcttcagcttttttcttttgacctacttcagaataaacacgtcccaaagacaaactataacgatatttatcatttaaattatcacaaacttccattgcatttgaaaaatactctattgcttgtggatatcgtttttcattattggcaataagtcctaataaatgtagaaaagatgccttcataccactaacagtgtcactcaacacaagccctttttcagcataccaacctgcactatcattatgatgtaccgaaaaatagcctcttgccatattcctataaccatataaaatacgacgtctgtcactcgccagttcatagtacctgatagaatgtttaaaattgtctatagaattttcatacaatccttgaaccgagttcaaataccctatatattcccagaccatcccttgtactttataatccctagtttcttccaagagactcgatgcttccagataagcctgcatagcatctgagaagcgctcctttaacaacatcacttttccataataaaagtaagccttccctgccttcaatttatcaccttcctgtttataatattctaccgctatcattatcaatgagtctgactgcaaattatccaaatagtttttatccaaagcctgcgttaaaagcaaagcataatctgctctctgttgtcctctcatacattcgggacattcaatttgactcagaagcgacaaggcactatcaggaaataattccatacacgcttccacacgtcttaagacattattgtcctctttttcttgtacacatgagataaacaatacaagaatcatcaataaattaattccatttttcatcccggcattcatagctcgcatattttagctttcagatagaacatctctccaataccgagaggcaagaatgggtataggctaatatgactttcctcgttactctctatcacacaatcttggcaaacagctccaaatgctcatccacatagccggcaaccaaagctgtatattcctcctctttttccaaaaattcatcttccagttcatcgaaagcctcatattgctcgtacattgccataaactcctcgtctgtgcgttcgcgttccaagtcgtcacgatggctatcgtatattttcttggcagcataaaccaacttgctcaaatcgcccactccccacaaacgcatcactttggcaaacggattgtcgaaaatataaccgccataaccattttgaatcagttggcagaagcccccttccatcacttcatcacggaatatctgataggccaacaatgaatgctgttcaccggtaagcaaaggcatcgtcccggcagtcatttctccgcctatttctttcttataagcaccggtgaatacgccgatgaatgcatccatcccttcaccggcagcctggcgcaatgccacatctgtaacttctatcatagtttgtattttatttaatgtgccacaaaggtaagactttgcagccatagtcaaacacggactcccctttattttcttcgccttgccaaccagttggcaggattttgccttaccattggcaagactttgccaccgcgttggcaaaactttgccataggcatggcaaaatcctgccaagacgcaagcaaggggttggcaaaattacttcctgattaacaagcacataccttattgattcacaaaccctatcagagacgagaaaaaacagtcaactgcaaactccactttacattccgcagaaattcagcttcttattacttctttttaataaaaaagtcaaattgaacagttggcagaaacggggaaaacaactaactttgcacccgactaataaaagtggactacgttttttttaattatatcacttaaaaaaagagctaattatgacttattcacacgaagtggaacacatgtgtgttgtgaagaaaggtcctaatcacggaccggctcctattcccgaagaaggtaaatgggtaaaagctaaagaaattgttgacatctctggtctgacacacggtattggctggtgtgctcctcagcaaggtgcatgtaaattaaccctcaatgtaaaggaaggcgttatccaggaagctttggttgagactatcggttgctccggtatgactcattctgctgctatggcatcagaaatcctcccgggaaagactatcctcgaagcattgaatactgacctcgtttgcgacgctatcaacacagctatgcgcgaactcttcctgcaaattgtttacggtcgtactcagtctgctttctctgaaggcggtttgatgattggagctggcttggaagacttgggcaaaggtctgcgcagccaggtaggcacattatacggaacgttggctaagggttctcgttacttggaaatggcagaaggttacatcaagactatcgctttggacaagaacgacgaaatctgcggttacgaatttgttcatctgggcaagtttatggatgaaatcaagaaaggtacagacgccaatgaagcattgaagaaagttaccggtacatacggccgcttcactgaagagcaaggtgcagttaaacacattgacccacgtcacgaataatataaggaggaaagacatatgattagagaagtaaaatttgaaagccaagaccgtcgtatcaagcagattcttgctgcattgaacgcaaacggtatcaaagacatcgaagaagccaatgctatctgcgaagctcatggtctcgatccttataagacttgtgaagaaactcagcccatctgtttcgaaaatgcaaaatgggcctacgttgtaggttgcgccatcgccattaagaagggctgcaagaacgctgctgaagctgctgaagctatcggtatcggtctgcaggcattttgtattccgggttctgtagctgacgaccgcaaggttggtatcggtcatggtaacttggcagccatgttgctgcgtgaagaaaccaaatgtttcgctttcttggcaggtcacgagtcattcgctgctgccgaaggtgctatcaagattgccgctaaagctgacaaggtacgtaaagaacctctgcgttgcatcctgaacggtctcggcaaggacgctgcacagattatctctcgtatcaacggctttacatacgttcagactcaattcgattactatacaggtgaactgaaagtagttcgtgaaatcgcatacagcgacggtccccgtgccaaagtaaaatgctacggtgcagacgatgttcgcgaaggtgtggctatcatgtggaaagaaggcgtggatgtatctatcactggtaactctacgaatccgacccgctttcaacacccggttgcaggtacttataagaaagaacgcgtattggctggcaagccgtacttctcagtggcatccggtggtggtactggtcgtactctgcacccggacaacatggctgccggaccggcttcttacggtatgactgacaccatgggtcgtatgcactcagacgctcagttcgctggttcttcatcagttcctgcccacgtagaaatgatgggattcctgggtatcggtaacaacccgatggtaggatgtacagtggcttgtgcggttgacgtggctcaagctttgagcaagtaagtagcaagtaaataattacatagaaaaagaggatagccttcattggctatcctctttttctatctacccacaatcgccacctttatcaccccctccagcctattctcaaaaatacggtaggcttcgtcaatttcctccaacgagaaacgatgtgtgataagcggtgtggtatctatctgtcccgccgctatcaggcgcagtatctcggcacaatcgcacccatccacaccaccggtcttgaagacaagattcttgccatacatctccggcaagggcaataactgaggctggtcataaagcgccacaatggtgacaatggcattgggacgggcacactcccatgccaagcggaaagtatcttccgtgccggcaacttcaagtacgacatctgccccaccatggtcgctatgcttcctcacaaagtctttgcagttttccggcccaatgaccagcacctccggataatgctcgcggacaaaacggattctttcggccgactgctcgcagacaataatgcgacggggcttcttcagcatggaacaaagcagggtacaaatacccgtcggcccggcaccgatgatgagtacagtgtcttcctcggttatttcggagatacgggcagcccagaagccggtggccaacacatcgcctaccaagagcgcctgctcgtcgcttaccgtatcgggaatacggttcagtccctggtcggcataaggcacacgtacatattccgcctggccgccatcgatacggcaccccaaagcccaaccgccattagtgtcggtacagttgttcacatatccgtgacgacaaaagaaacatttaccacaaaaagtctccacattcacagtcacacggtcgccgggctttaccgactcaacttcggcacccacctgctctacgatgcccaccatttcgtgtcctaccgtaattccgggtacggcgcgcggtacacttccatgctttatatgcaagtcactggtgcatatgctacccagtgtcacccgcacaatagcatcacgtgcatcttccaataccggtatcggtttctcaagcaatccgaactttccgtgttcaatataagtatatgccaacataatatatgcttttttgagttatcacttctaaacgcgaagttgccagaaagcaacagccgctgcggccgccacgttcagcgaatctacaccgtgcgccatggggatacgaaccacatagtcggctcccgcaatcgcttcgtgcgaaagaccatctccctcagtacccatcacaatagccaaccggggctcggtcttcaaaacgggattgtctatggaaatggaattgtccgtaagcgccatggccgccgtgcggaaacccaactcaccgagcgtatccagaggaccgtccatccacgtccacggcacaagaaaaaccgttcccattgaaacccggaccgcacgacggttcagaggatcgcaggaattacgcgtcaacagcacagcatccatgccaagagctgccgccgaacggaagatggccccaatattggtggtatccaccaccccgtcgataaccacaatacgccgggctccccggcagacgtcctccatactcttcggaaccggacggcgcatggcacaaagaacaccacgtgtcaaaacgtagccagtcagctcggcaagcaattccctaccgcttgtgtagacgggtatatcgccacaacgctcaatgatttcagcagcatccccataaatgtgcttgtgctcacacaaaagggccaaaggctcgtagccgacatccagagccaccttgataaccttaggactctcagctataaacagccctttgtccggctcaaagcggttgcgcaactgggcttcggtaagggtactgaatatctccacaccgggatgggtcaaagatgatatttcgataacaggcatcggatgatttactatttgacgattactatttacaattcatggcagaaagccctataacccctttattgtcttcatcagttgttctcccagtccgatggtgtatccttgcgatacaaagaccacccgattgaaagtatcggctatgatgaatatcggcaggctctctttatgcttcaacttcatgctttctgcaatctgcgcagcgataccgtccgtatctataccataaataatggtagagggcaaatcggggaatgactcgcgggcgaacttgccggctttggcctcattagggaacagcaacaccatcttacgcccccacttctccaaatcagccttgaatgaagcgatgtcgcgcaacgcatgattggttggctcttgattgacacccagaatgcctacgacaaagtaaccgcgcccacaagcctgcagcagactctgctgggctgcggagccggcgtccggcagcggagtgaagagagactccgaattaaagttcccgataacctgcacctcatcctcgctctcgcgcatcaccaattcaatttccgttgtcttctccggcagaatattgaaaaaggtggttttagaaagtaccgcaccgctggcaaggcgtgtaccggtcaccaaaacataatctccggcctccagagctgttccttccttcagaagattgctccatgtagtaccgccgcccatatctgcatcgccttcgtcataggaaagcaattgcaaactgccctgcggggtctgtttggaaagagtgaaatgagaatagtatttcgggttatccaacgaacggataggcttataggaagccaccaactttcccttcgaagcaattccttctgccataaagaccggctcttccggatgatggttcaagtccacatccatcgcaccatcatcccctatcaactgtactttgccggtcactccgttgatacgggcagggattgccatgctgcgtgccatggagacgaagaaaatgtcacgactatgggcatcagccacacgggccttccagaccccttccggagaaatgggagcccctcccaaattacagtcattgtctacccggatattttgggccacccatgccaccagtttcatcggctctgccttgtatgcctcagcatcttcctttgagacggctttcttgaaaaatcctttatagggggtcagtatctcgttgcttacgcgtggattgcgcacatatctgcggaaatggtcggcattcttgcacatacgggattgcatgtggtccatcagaacttccagtgtaacgtcgcggaggtcttttgccgaaatccgttggagcaggtccagacctcctcttttggacttttcagagcgcaaccgtgccatgaagtcggcaataacccggtggtttcctctggaagctaccagaatccgggcaacggcatcctcgtcgagctggtactgccgggcaaaatagcgagcagtctcatctgtcataaacgtagccacataggcattgcggatagaatcttcatgagccatgcggaggtcgttctcagcacgctgttcgggagtaacctccggcaactccgcattttcggggggcggcacaagttcgaaatccgccgtatgaccgtcaccggcagtcttgtccatcttcacagccaactcatggtccttgccgaaagacagtttggcatagccgaactgtccgtctttcgatgcccataccagcatgtcgcctttaccggctgtcaaagaagcctttccctccgcatcggtccgcttccgggctacggtataaaactcagcataattgtagagtttgaactccacacaagcatcgggcaccggcttgccttgcccgtccgttaccgtaaccgtggccttggccgtcggtgcatagttaccgattacattgatttccgtataattgggagtgacggacatcacttcttccactccttcataacgtccgaaaactttggtatgcatcaacatgccgcggctggccggagcattgaaccaaccaaggttgagtaccggttcgggttcgcaggctccaagaaaataccatttcccgtctgcccatgcttctacccacgcatgattgtcgtcggtatgcgcccaccggggtgtgtagacctgacgagcagggatacccaccgaacgcaaggcggcaaccagcaaggtagattcctcgccacaacgcccgtatgccgtgcgtaccgttgccaaaggcgaactggtacgggcatcggagggagtatagatagccttctcgtggcaccagtggttcacctccagaatggcatcatagagggacagagacttgacacgattcttcagttcttcgtaaaacactacccgtgcactgtccagatgctcattgttgacccgcaccggaagtacaaaatgacgaaacaaatcctcaggaataacttttccccaaggcatctcatcggcagccttttgggaggcgcgcacgttcatcagatgaaattctccggaataatcggcaatgtctgccaaaggcatataggcataaaggaactccaaagcttcgcgttcgtacgacgtcaagtccgtatcaaatatggcaaacaaatcgccctgcggcaacctttcttttttttgattgaagtcttgctccacacgttggcggtaagaagtgtctgtaatgaaagaacgtttgccgcaagaggcaagcaaacataccagtccgagaaatcccagaagtcgtgcaactcgtttcataacgcaattattaaggttgaaccacaaaaatagtgtaaatcgtccgcaaaagaaaattaattcccgttttacttacataatcactctacttcagatgtatcaccaaagtcgtgtctccggaaaaagtgaagctgcatttgtcataagacggcggacccataacgccttgagcatcattactgaacccgtacttctctgtaggaatgccgaaaacggcagtatccagtttcccgtttccgttctcgtcttgaaacaacgaaatggcatacgtacccgtaggtaacccctggcaaggaatggagagcgacgtatctttcacatctatccggaaggcggtcaagggtttcttcatgaatgtttcttccgaattgtagatggcgacatagagatgcccctccaccttttcaatgtcacacacttcaatagtcaggttctgggcaaagagcagctgggcggcactttgcattacaaatactaaaaaaataatcattgctttcatctttgtttatttaaaaagggttattgtctaaaaattggatacatcgtaggcggccttcttgcctaaagtcacatatactcctacatagaaaaaatggtcgctggaagccaggacagccttgttatccaccttaccgaactcattcttccggcaaaggatattgctggtggaagcatggatgattaccttcttgcttgccaggaaggtcacacccaaatccagactgttataaggcttcacttcatcgttcatcagacccggcagcatggagttatgataaggacgtccgctactgaaacggtcggtcacgctgacaatggaacgcaggcgaggcaaggaatacttcaccacccaggctgcattatgccgtgtagcatactgaggagtagtcagttccagatactcccgatatttacgtttggctatattataggtataggataactggtattccagattcttgaaggacgctctatcacggaagaacaagtctatgcctttgctgtgtccataaccgttggaggtcaagaatacagctttcgtatcggcatccgtttcctccaatgccagacggtcataatccttataataaagttcagctttacagaaacgcccttcatagtcgtactgaacgcccaaattgtactgcatacatacttccgacatcaactgcggccgacgcaccaaacagttgttctcgggcaactgtgtgtatcgccctacaatccccgacagcatcatgtttccccaataatagttcgccgccagccggggagagaaattcatcttacggttcggagaagtgtattccgtgcgaaaagaaaactccatcttcaattgttccatcggataataagccatcgaaaagaaacccgcaccaatggtaggcgacatgcgattgctgtcatccgtcccgcacaacagataatgattcctgtaattgcggatatagctctctatccccatatccaggcggaataccgatgacagccgtttggaaactttagccttcagatgcgtctcttgctgacgttccagccagttatcacccgaaacaactgctcctccgattctccggttatagtaagaataggccgcccctgcaaaccaactccactctccggaagtatgcctgcgaaaggttgcatttacatagatattgtcttcacccagcccgaacaatctgcggttatccccttcgtaagtggaaaagtccgtccggtcgtattgtgcgtaaaccttccataccactctttcatcaagagtataacggaactggacagctccggaaaacatccggtaaggcttctcgaaatccctcctgcccgaataaaccttgtcatacaaacccaggttctgataattcaagtcaacagacaaggatcctctgtcaaaagtctttgtgccccctccaccaacaccgacaacggaagcgttcactccgactttatcgaccttgctgtaatcttttgtttccaatggcaagactgccgaaagcgcttctccatattcttgtgaagcgcctcccgaagcaaggtttaccccactgaacataaatgtagagtaacggctgcgagcaggggtatttattccgttcgaagtatagggattcagtacatgcattccatcaataaaagtctgcgtctcgtaactgcctccaccacgtaccagcaattcaccggtttcaccctgcacttgcgtaccgggcaaagtctgcaatgccttgtataaatcaccgttcgcaccgcccaccgtgaccagttccaccggatgcatatcgctccaacggctgttggcagcaggagttctggctccttttaccactacttcttccaaagcgacactgtctatattaaaattcagacgtactgtatcggtcactgatttctgcgctacggaaggctgtgtataaagtaatacacccaatatcccaaagactgtttcccgtttcatatctttacattcgttgtgtttcctgccgcaaacataaaggaagggtataagacaaaaaaatatccgggacagacagcccggatatgtgacaaccaacaaactctttgtgacgaacaacgtatttctgtgacgagtgactaactctttgttcggttttcaatcaatgctttcacctctttggcgtatgcgcgtgaaaccggaacatcttcttcgcaaccctccagattcagcttatatccctgagagtttccatctactttcaccaccatccggatgtttacaagaaaggccctatggcaacggataataaaagggcaagcagagacagcttcctctgcctgcttcatggtggcacgcaacaatctccatgtaattttcttttctttatccgaatctgaacggtaacctacttttacgtaattcccctttgcctctgcataaaggaaatctccggcctttacttccagcatttctttggtgccaccggcaaacaccaacgcttcttccgaggaaaacaccttgtcttccaagctcgctatcccaacttccggggatattctccttgaaaggtgaccgttcatctccatagcttctttcagattgcgggtcagttgcaaattgcggttccacatcagaaaaaatatggtaggaaaaggtgccagcaccattacccaagacaaagccagaaagaacaaccgcttgtccaaccacattcccatcaaccatgattgataggcccaaatccccactgctatcagcaacaacatcagcagcaaattcaacacatgcttacccaatgtccagttctgctccttgtaataagcaggaaataatgccggaagcaaataggtgaaaactcccgaagcacctgccgcaatcaatgcagaaccggcaaccaccccaaacacacttccctttatccgggaaataccgaacggctgaagtatatataatatcagaaaaataatggccgaaggtatcactactgccttccagcgttgataaaacgtaggataaggactccgccaaagttccaccaatttccccataagtatatagtctctcttgtttacatggtaatatatgcaaagataatacatttactcaacacatgctcatacagatactatattatcaatctgttttatcacacgacaaggatttcccactgccacacaattcgcaggaatagaacgggtaaccacactccccgccccgataacgctgttcctcccgatggtgacaccaggcaaaatgacaacccctccaccaatccatactccatcctctattcgtacaggtaaggcatacgtacggcagatttcttgttcttccggacagtcctgcaccatacgttcatctactttggtagaatgggttgccgtatatatctgtacattagaggctattaagacgttgctacctatgtcaatacgattgttgtccacaaaggtacaattcatgttgacaattaccttgtcgcccataaaaatatgcttgccacattcacaatggaagtcaatatccacatgcacattcttgcctacatgtcccaacatctcacacaacaactccctcctgcgcttgctatcggcataatctgtggcattgaattgtgccaggagacgttttgtacgcaaaatcatctccactattttcggatccctgcttcctataaaaggttcgccagccatgcacttttcatattctgttttcatacacatcctgtttttgcggacaaaaatacaaaactctaatgtataggaatttatcctatgttaaaaaatacccctttgccctgatacgactcaatgattgttgtgtaatgccaaggaaagaagcgatatgtcccaaagtcactctatgaaaaagggccggacactcactcattaatttttcataacgctcatacgcagacaagttgaggcgagatatatgaatatcttgtaagcgaagaaaattttcctgttgtaacaccctcatccaatttgcaatatctatatctgacttatacaactcattaagcgtttcaatggaaatagaatagaccagtgtttcttccaatgtttccacgtattcaaagcctgctttgttcctatataaatcccacgagccacaagctacatcaccttccatagagaaccatgtcgttatttcttttccatcgtgcaaggtgtacgagcgtgtcattcccttctctatgaagtggacttgcctatcaaattgtcctgcacggataataagtgttttgacaggaaacacttgcttttcaaaaccatgtgccaatgtcgccaatgcttcatctgaaaccggataataaactcttattgttctgacaatattctccatactaaaatatccctttttacaaaggtataaaacaaggaagagtttgcgaaacttgcgtaacatatttgtcatatatagattgcaaaatctagtatttctaaagaaaataaaggatgaatggctattttttatgttataaaacacatttctcgcaaacatttcgtatctttgcaacgttataagataaaagaaaagatgtaaaaacccgctttccgaaacgcggagagcacaaaaagatgagaattatgaaaaagaatgcaaatgaaatttttatgttacagtaccaaatcaaacgctatcaggcaatgggtaatggaacaatgtgtcaaacactgaacggtaaactacaaaagctgcttgcaaagcagtcactcgtaaccatgtaaaaaaacacctttaaatacaatgaataaagggcagggaacttttctgttctctgccctttttcttttttatccatctatactaatggttagcaccaacaacaaactcactttgcatccttatctccctaccgtcaaccgaaattccttgtagggtaattatatatattccgttcatatccgaagtataaaagttgagtgtacccatagcggaagttatctccggattccaataaagtgtatgccgaaaatccggtaagcgagaaccggcttgtttctctgaattgtatgatggagcaacaaatgcgattctcttttgtggaaactcataagaaaacatctgtgaattcttatccaaacgtatatcaggcaatgttccccgatgggttataaacgaaacaattccatcatacaactccccgccaaaagtatatttgccagtataacgatgtatatagtgtatcaaacgggcatcatagttcagaatggtttcatggtcatcaaacggaatcccgtctaacaacaccagtgttttcatattactgaatctccttatatccggttgcagtatccggatgacatctttaccttccagctgactgatacgtattcccttaacaaattccacaaaaacatccctcacagtcctgaaacgaacatactcatccagattataagtggaagcgggaacaaaatcataaagttgttgcaatatactcttgctatacgaagaatctaccggcaaaagagaatgtaattgcgcgctgaaaccacgctctatcaagtcttctttccgaaatgacacacagactttaggaagtttttccgccaacaccccgacaaaaggagaaataagctccaatcggcagggactttcctcctccggtaatgcagttaatacaatctcctgcatatccgttattccggtcgtataaaaagcataaatagcgtcagccttaggctgtccgccaaagacacgaatatccttgcccacacatgccagacgtgcatttacattgtcagcaggcgctcccatcagcctgccggttacaatatgcccttcacactctgcagcaaatgaccgttccggaacacttgtatagttcttctgcccgtcggctgatattggaaacccctttagcacatagtcttttcgtactacggacaaagtaagctccttgacatcagcaggcagattgggtaatgtcaaggctactttactccggttcccatagaccgatttatctgtccataagtccgctccggaaagctgattgccggaagcttgtgaaacggtaatggaatccgtgaaaagttccacattatcctcctctgttgtctgaacagtattaagcaaggctatatacttctttgggaaacaagccataggatagttcctcatataacgcgtatatgccgtcagttggtaagctccggtatgcatgacttgcggaagtctgatacgtccccatccattcccgttctgcaagtcgattttaccttgtgcgtataccagcttcgtgtcacttatctctacataagctactttgcttaatacgcttccacgagacaaggaatccgtcacacaaacttttatccacaaatcttctccagccacatagcagtccttgtctgtataaatacgcatattctcaacaatttgagcgtgtaatcccaatacaagaacccaacctataatacaaaatatcactctcttcatatcatttcaatattaattcatttcatccggccagaaggaaggcttttccaagctggcacctaaatagcgtacgtctgtacaacctccggaaacccatgcataacctaccatcaatggataagcaatagcatatcccatcacatataaatccatgtacgaatctgcccaacctctaaattcttggcaataaccgtcaggaaacctataatatatatcatcggcagaaatgaaaatacgatattttgccacattcatgctaactcccacataaccaactacatttttgcctgaattgttgcaaataatattcgtaggaagttctgaaggctgaggaataaacaatccacccatttcttcattgatttttattttctcctgataatattcgtattcgcccctcgaaatcttacgctgcttcaccaaagtgctataatgatgaaagacacggttattatccgcctttatagaataaagccacttatccttcaattgagcatccttatttgttcctgtattacctactatgattttagccgacttattatgacaccatccccgtgcatatggtgtagcatcaagatcaaccacctcatcagtggtagggtcgtaacggaacttgggattatatactgccctcacttcccaatcttcctcgtaactccagaaataacatccgccatcttcactccgcatagaaaagcggatagagatgtcaccgtatttttccggttgctcgtaggtgacgtcatctattgtttctgtctccaatggatattgaggctccgaagtataaatatccccttcatacacaatcttcagactatagctggcatccttattcaaagagccaattacaacttggtattttccatctcccaaagaagtgccattaaagcaagaaccatcacttcctactacactgacttctgcatctatcttgttataatcttgaggaattccttctacattcaaaggaaaggaacagctcaaggaaaaaacgactgtactatctgatatgatattaccttcaactataagcaccctcgtactactctccggcaagtgcgcattgaatttatccacacaactgccaatagtgagccacaacaagcatatccatgttactatatattttgcattattcatcgcttttaataatcaaaacagattgatttcaactggccagaaggaaggcttttccaagctggcacctaaatagcgtacgtctgtacaacctccagaaacccatgcataacctttgaatcccgtacgtgggtccgggtccggatatgcaatggtataccccatcaagtataaatctaaaaatgtatactcttctttcagccctttcgctccctgacaatacccctcaggaagcctatattgtatatcatctgtagaaatgaaaatacgatattccgccacattcaaactgacaccaacatatccaatagcctgtttatctgaactttcacatctaatgttcgacggcaattccgaaggctggggaacaaacaacccacccatctcctcattaagctttattttctcctgataatattcatattcacccttcgaaatcttacgttgtttcactatagtactgtaacaacaagaaaaacgaatatcatctgcttcaatggaatagagacacttatcctttacacgattatccttgtttatttccatattacctattattatctcggacgattcactgtgacaccatccgcgtgagtatggtctggcatcataatcaacaaccttgtctgtatcgggatcataagcacacataggattgtatactgctctaacctcccaatcttcttcataattccagaaataacatgcagcatctttgctttgcatggagaaacggatgctgacatcaccatactccccttgctgttcgtaagtgacatcgtctatgctttccgtccctatcggatattgaggttcggaaatataagtatctccctcatagacaatcttcaagctatagcgaacatccctatgcaatgttccgacagcaacccggtactttccattacccaacgcaacaccactaaaactggagccatcctcaccggttacacaaacttcagcatccaccttattgaaatcaggaggaaccccttccacatccaaggaaaaggaacggctcaaagaaaacacgacagcactatccgatataatactaccttcaactatgagaaggccgatactactttccggcaaatgggcattgaacttatccacacaattactaaggaacaaccataacggacatatacatatcacccaatatattttattcttcataccctttcaaaatttaatattataagtaacaaaaggaatgggagcaccgaatatggacatcttgtatccttgaatcctaccctcctcggacacaaaatagacagagtacacattcttccttccggtcaggttatagataccgaaagaaagggaactgtgggtcaacaatgtcaggtgatggctgggttcaatattgaacgacaaatccatacggaaatagtcgggaacacgataactgttacggtcggtatagtaaacctgcatctttttcagaccctggtcgtagtattgcccggcaggaattgtggtgggacggcccgtactgtaatccatattgaaagacatgctgtaacgacgggtaaacttgtaattgcctacaagcttgaagtcatgcggcttgtcatactcggtcggataccattctccaccattgatgggacgggctatgcgcggatcattctgacgcaagaaagtgcgcgaataagtatagctcatccatccgttcagttttcctacctgtttcttcacctgaaattctacgccgtaggcatatccctccgtattgatgacatccgtctccagatggtggttcatcaggatttgggcggaactgcgataatccagataatcaatcagctttttgtaatatccttctacagataattccagaagttgccccggcgtattatagtaggcacctgccgccacctgccagccacgttgaggcttgatgttggggtcgctcagcttccaggtatccgtaggagacataacggcagtattcgataccttatggatatactgcctcatcgtattgaaaccggcctttacggaaaaatcatctgtaaaggcataacgtgccgacactctgaattccggtccgtgataggtcttgatgacctttccattccccgccgtgatagaatccgccaccgaagacatggagggcagcataccttcctgatatgtatagtaagtgcgcggtcccaaagcattgagcatggaatagcgtatacccgcattgatggagagcctggaagttatatcccattcatcccctatataaacggcactttccagtgctttatccttttgcagttcatcatatcttaccagcgaattaggccccaccggctcgtaggtcccggaattcacattatacagctggctcatcaaaccaaagttcactgcatggctattgccggcttgataaagaaagtccgcttttccaaaccattggttaatggcaaaagacagccgtgcggcagacgcttcctccaccgtttcatcatttcggtaatcgtagtggtcataaccgaaagagaagtttccggtcagcttatctgcaaagacagtccgccagtttgccgagaaattcatattgttgtaggcatacttctcattgtcattaaaggcaaaacggtcgtgactataatagccatagacattcagcttgttgcgctcgttcaccgtatgcgagaagacagcccccaagtcatagaaacctgctttcccgtcacgatacccacttttgttgggcaaggtcttcattatccagtccgaataggtcgtacgtccactcagcagaagggaagtcttttccttaatgatgggaatctcgagattcaacttactggtcacaagcccgatacctgcagaaccggtaaacttttccttgttcgcctccttgctggtgatgttcagtacggaagcgatacgcccgccatactggctggggatactgctcttataaagttccgcatcctttatcatgtccgaattaaaagccgtgaaaaaaccgaaaagatgattggggttataaatcgttccgttattgaaaagaagcaggttttggtcggcggcactcccacgcacattgtatccgctggatgcctctcccactgtcttgatgccgggaagtgtctgtatcatcttcagcacatccacctcacccatagccgtaggaatgtttttcagcagggcaggctgcagcttctccattcccaactgcacacttttcacgttctgtatacgccccgaaacaataagcacctcatccagcatatggtcttcctcttccaactcgatatggacaatgccttcaccataaagcataaattgccgatgggtcactttgatattcatcccactgatttcaagaatattatagcctgcaggcaggtcaatggtaaattccccctgacggttggtcgtcgtagctacccacggctctcgatgaatgatgttgataccatccagattctggccggtcttaaagtcagaaactcttccggtcaaagttatcatatctccgggggcaggcttgtacttgtttcctatctcatagaccttattttctgaagaagacttcacaataggaatgtatgaaggcaatagttcctcatccgtctccaacttttcccccatcaataccggtggcagcgaggtggccagaaaaacctccggcaagacaaatattctgtcaccataaaccgtcaccttatagatagtagctgccaaagcctctctcaagtactcggcagtggggttcttcacctctgcccgcttcactttaaaaggaaccgttatcgttgtataaatacggcaagacgtgcccttttctactgcatccatcaattcgaatatggaaatgctgtccatagccatctgttgctgtgcaaacatgccgaaaggcgacaataggaggaaaaaggctactgtatatttaagattatgtgctttcatattattttccatgaattaaggaatcaatatattccgttaaccgggtcattgcccggacaccgccatcttccttgaagtccagccgctctttccggcaataagccttcaactgcttcttgtatgtaggaaaaagtttcaagaaacccgaacgggaagttatcacataatcggttccgccactgcgaagactgaaatagctctttttcttgaaccggctgtaataaagatcgtttttcttcacctgagactccattgtggatacgatatactgtgtcaggcacatttgcggactatcatatagcaacgcagcgaaacagtcaccctgcggtacaaacttctgtccttctatgacaaaataatccactttccgcatatctacctgcaaggttatccgtttctccggagtaaccacaatcagactctttttataggtatcataacggagctgcaaatccgagtaaagccatctgccataacagacagccccctcgcgaaattcatccgtattccaatagggatggttaagatacttctgctggttataattttcctctgccttaccggagtaaagagcagcataatctcctgccgcttttctgaattcatcaaaaacggcttgttgtgcacaaaccaaagatggaaaacataggacgcatagtagcgtgtaaaggtgtgtttttcgcatatatgtgaagtgttataggtgaggataatcacaaatataacatttcacttttaaaaataaaattattattatatataattcaaataaaaacaaaaaatagagccataatcggatgctaaacacaaagctaaacatttagcatgcaagcagaagcacattacaataagattaaagcaccattcatcctccaccatcaattatacttacatatatttataaaaaaacgatacagcacaatcgctcaagccgcaacaatatccttcccgaaaggagtcaatgccagccctgccagcttaaagtgttggataccgaaaggaatgcctataatggtgatgcacagcaataacccgaatcccaagtgcgaaaggcaaatccaaatgccgcccaagaatatccaaagaatattcatcagcacatagaggcaaccgttggaacgttccccgctacgaacctctttgccgaaaggccacaaggcaaggcttgccattttcaaggtctgcataccgaaagggatgccaataatggtgaacatcatcaataaacttgcaataagatactccacagcagtgatgatacctccaaacatcaaccacaaaatattcataaaacagcccatagctttcctttttttgatactgaacacaaaggtatataaaaaaacagattttttacgcccggtaaataagaaagtcaagaccgcgactatctttgtggtaaaaacgaggtcatagggtttccccatcctcatatgtccaacgggcttgatgtcccaataaaaaaatacttctatgaaggtagtctgcggtcttgacgtacacaaagatagtgttttttgctgtattctgtgtgctaatggagaaaaaatccagcataaattcggagttcttaccgaagagttggtcacacttcgcgaccttatggtctctgaaggtgttgaagagtgtgcaatggagagtaccagtatctactggatacccatatggcgagtgcttgaagggtcagtgaaacttcatctggtaaacccttattttataaaacagcttcctggcaaaaagagtgatgtgaatgatgccgaatggatagctacttgtctgagtaaagaactgatagcatcaagctttgttcctgatgataaaattcaacgtctgcgtcaatatgacagaaggatatttgacctgaatgtttccataagccgcaatttagtcaaacttgaccaatgcatccagaggtgcaacatcagaatcagtaattatatatccacaacagattccaaagggtaccgttcaatagttaaacttatatcccaaggtgtgacagatgcggaagtccttgtgaaggaactgcatggaagaacaatcaacaggcatggcagagaaacattggtgaaagcacttaccggagttgtcagcgagaccgacatagacattataaaccagcttgtagaagagattgaattgcagcaacgacacaaggacgaagcacaggaaaagatgactgcactatgcatggagtggtttcctcaagaagttgaaaaccttcagactataccgggagtgaaagaacgtagttcgacctcaataatagcagaaataggaacagacatgacacatttccagacaccaaagaaattggtgtcatgggtggggctaagaccccgtaacgaggaaagcgctggcaaaatcaaggcacgaggtatcacacatggtaacaggtttgtaagaaaaaccatgattgaatgttcatggggagctgcacgtatgaaagattcatttttcgcagaattctcatacaggcaatgtatcgaaagaagaaagaacaagatgaaggtgcaagtagctattgcgagaaaaatacttgttgcagtatggtatgtacttagtcagggaactcagtatatcaaaccaacagatcattatacggcaaccgatatgactgccgtataatgatacaaccgtccgttacaaggtcaatatatttgtggtgattatatcccgttttcgcaaagtggctatcgtttcggacggagtaggacacccggttgagttttaatctcgaagaggaaatgtacataattgttcattgttccgactataatcggaactgaaccgtcatgcagtagtgcaaggaaaaaagatgtagaaaggaatagacactcgtttccactcacaaagatagtcgcggtcttgcttttcatagaggaaatatagcattatttatttgaatgttccgtctcccagtcactaaattcaaaactcagctgttcccagactcctttctcctccccctcttcacgggggttggaaacggaaagcccaatcaaacggataggatgatgttcataatccacttcctgcagcaattgctttgccaaaggcagaatcacgtcaagggcaaccagctcctttgcttgggtcatactgcgggtaatctggctaaaatcatgaaacttgattttcagcgtcagcgtattcccgcggaaattggcgtgctccagtcgccccaccagctccactgccgcatggtacagctctataatgacggatgaacgcttgctgatgtccttctccaacgtatgttcgcaacccacagacttgcggatgcggacagcctctaccggacggatatcgatgccacgggcaaaatcataatagactgtccccactttgccaaattcgcgggtcagcatctccaaagactgcatacgcagctgttccccgttgtgaatccccaaagtgtgcatcttcttcgccgttaccggtcccactccccagaaactttcaatgggcagccgggcaacaaagtccagtgcctgggcaggatgtatggtgcaaagcccgtccggcttgcggtagtccgaggctatcttggcaagaaacttattataggatatgccggcagaagccaccagattcaacctctcccgcatcttccgctttatctccttcgcgatgtctacagccaatggaatgcccggtttattctccgtcacatccagaaaagcctcgtccagcgaaatgggctcgatgacatccgtatattcatgaaagatttcgtgtatctggcgggaaacggatttgtagacttccatccgtcccgggataaagataagttgggggcacagccgctttgccttcagtgacgacatggcagaacgcaccccgaaacgccgtgcctcgtaactggctgccgccaccactccccgctcctccgcatggcccacggcaatgggcttgccccgcaatgcagggttatcacgctgttctacggaggcgtagaatgcgtccatatcgatgtgtataatttttcgtccggtcattcttctttcaactccccgatacaaagatacactaatttttcttcatccgaagtatccgccgatagacataaatgaaggctggtattaaaaaggcatctgcaaaaatccatgcagtagggtcaccaaaacacacggccagatagccgaaagccggaacagccagcaggctgaccagtatccgggcaatcatttccgagacaccggaaagcatggcaagattggtatatcccaccccctggatagtgtatcgcaggatgcagagcagtcccaaaaccgggaaaaaggaaacggaaatgtgcaggaacaactccgtattctttaaaatctccaactcagaggcatctacaaagaacagggcaaaagtcctggcaccgaacatcagtacacagaaagtgaacgcccaataaacaatcatcatcagggtgcttgccttgactcccatccagatacgttccggcttgcccgcaccgtagttttgcccgctataggtggccattgccatgcccagactctcgaaaggacacatgaaaaacatcttgatacgcatggctgccgtgaatgcagccacacaagccgtacccaaagcattattggcgctttgcagcataatgctgccaatggcagtaatggaaaattgcagtcccatgggtacgccgatgtacatcagtgtgcgtgccaaagcaccgtcgaatttccgctcggctggcgttgtcttcagaatgtcgaaacgacgcatcatatagatgtagcacaatatggccgagacgccttgtgaaaatacggtagcgatggcagctcctgccactccccaacccagtaccagaatgcagaacaaatcgagcaggatattcagtaccgtagagagaagtagaaaccaaaacggcgtcttgctgtcacccaatgcacggataatactggacagcagattatagaagaaagtaaagggaaccccgataaacgtgacaagcaggtaataataggctcccgtgaatatgttctccggcgtactcatcatgtgcagaatgtctgcacagtaaaagctggtaaccacggcaatgacaacagacatcaccgcagccagctgcaggctgacagccacataacggcgcatcgtgacataatcccgcgcaccgaacttttgcgccacgggaatgccgaaacctccgcaacagccattgcagaatcccagaataagaaaaacgaccgaagtgcttgccccgactgaagccaaggcgttgatacccagaaagcgccccacgatggctgcatccaccaatgaataggtctgttgcagcagattgccgagcagtaaaggcaaagtaaagttgaaaatcaacggaagagcccgtccttccgtcatttctctggatgttgccataaatctaatacctccgaaattgggtgcaaaaatacgaaaagatagcgtttacagacttgacgaaggtcaaatttaatagggaagcttaaggagaaggaaggcgaaggacaaatcgttccatcatggggaaaatattattccaccactaggaaaaaatcgttccaccatggtggaacgatttttcctccacgatggaacgattaaatctatgcagattcggagcttagtatttacactcgcgaattatctctatcagctgccggaaatcttcgggatgaacatctccgatattgccgatacggaaagtgtcggcttgcgaaatctttcccggatagatgacaaatccacgttctttcagttgtgtgtagaaagttttgaagttgaaatcggcataaggatagaggaaagaagtaataacgggcgattgaatctcgtccggcagcaacgtttggaaaccgagggaacgcatgccgtccaccagcacgcggtggttctcgcaatatctgttgtgacgggcctccacaccgccctcctctgccagttcgtccatggcttgcttgaaggcgcggaccacgtgtgtgggagaagtaaaacgccatttgccatgtcctttctccatggcttcccattggtcgtaaatgtcgagagagagtgacttggagacgcccttgcagtgcaacagctcggaacagcgggcgatgatgaagccaaatcccggaacgccctggatgcacttgttggcactgctgatgaggaagtctatgcccagttcgtgtacatcgaggggaacaccgccgaagctgctcatggcgtctacaatcagtttcttgccgtgcatcttgacgaggtgggctatctccttgaggggattgagcacgccggtagtggtttcgcaatgcaccacggcaacgtgggtgatttcggcattgtgcgaaagatagtcgtcgacgtagctgacggagacttgctctgtttcgtcaaaagcaagcatgtcgtacgagatgccgtgatactcggcgatgttgcccatgcggtcgccgtaggcgccgttgctcagtatgaggagtttgtcgccaggcttgatgacgctaccgatgacggcttccacacaatacgtgccgctgccttgcaggaggatggaagtatagtcgccggtatgctgggtggcgagggagacgagggacttgcggatttcttccacaatgtggaggttgtagtcttcgtcccaggtacaccagtcggtcagcatggcttccttgacggtttgtgaggtagtaagggggccgggggtaaggagaatgtagggtttcatatgcattgagtttttaagtttatacgtttataagggttacaaaatctcaagtttacggtttatctcggcgatgactgcggggagctcggcaatggtatcgaccacatagtgggcaccggcggcaagcatgcggcggcagacatcggccttacgggcttcgagctcatcggcaggcaaggaggagacttcctcttgcgtcagtcccagttcgttactgccgaggactacgccgacggtccatgctttggcattgataccctccttgatgtcggcgatggtgtcgccatacttcaacacacaatctacggaggggatggcgaggtctgccatattcttatatatcatgtagggagcaggacggcctgcaggcaacccgtcgggagcgacgcaattatctaccgcatagcctttggctgtggcggcaggcagcacaacatccatcatagagcgggtatagccggtggtggagccaatgcggataccttgcgcacgcagtgcggaaatcgtttccaccacaccgggaatagggtcggtataatcttcgagcgaggcaaacaacacccgttggaattcggcataacgtgcctgcacgtcttcctcaccggcgggacggccgaatttccgttcaaattccgcacggacacgctctatatcgaacagcgcacggatttcttctactttggtcagccccatgtgcgcacgtgtttcggcagctgtgacgggaacgccgatggcccgaaagctttcgacaaaggcggcgacgggagcaaagcaaccgtaatcgacggcagttcctgcccagtccataatgatacattcaattcttttcatacgatatattattattcagtctcaagaagcaaggaattgcccggccgggaccaacggcgcaaacggaaaagggaagagcccaacggtcccgaagcattctccttgcgatagcgctgcaccaggtagacagccgagcataggaaagccacgctgcacacaatgccggcatagcccgacatcaggttatagaaatccagccagttgatgtccggattgaagaattctttgaataccaataccaccaccgtaccggtatacccgataaaatcgagtgtgacaataaagaaccccacattccccttgatgcggaagcaggcgatgaaacgctcgaagaacaacgtctggaagctgaggtaaacagtatagagcgacaaactctggaggaacagccacgtcatgggtggcagttgcaacccatcgtaattgaaggccacgaatcccaaggtcgctgtgccgcacgtcacaagcaccagcagcaggcacagcacctttatattactcctcaccgcggacatcagtccgaaaagcaacaagataatcagtgtcaccaccgcatctaccttggcaaatgcccacgacgacagctccgccgcctccacatccagaatcttcaccaggaagtcctccttgatgtcctgcaagacggtgatgaacaagtttgccgcaaacagcatcagcaataccggcatgaagctcttgaagaggtccgcacgcgccctgccgtccagcgtcacccgttccgagcgcagtgcccggtctgccgcggtaggttgcggcattctcgtcatcagccagcccagcaacgacagcagcgggaaggcaaaggcaccgataaaggcaggcatccagaactcactgatgtggagatgctccatcacaaacagcccgacggactttgccgtgcccgaactgatggcaatgctcagccccattaggctcgccagcaggtccgtcacccgccgcccctcgaggaaactgaaaatcactccccacatgcatcccaacgaaagcccgttgaagaacagcgcaaagacattcagcggccggggcaacgctccgaacagcaccagcgaaagctcggccaccgccaccgagaggatgatgaacttcagacggttctccttcttcagttccgaaattaccttgatgccaatcagcttggaaataaaatagccggaaatctgcacgatgctggttgccgtcttgtaatccatcccgaagaagtcgagcccgtcgaagcccgcagccgtaaacggcttgcgcagcgcatagaccagtgaataggagagcaaagccgctccacccgcccaaaggatgaacaaggcatcagccagtctcttgctctgtattatctgttttttctcaccgttgaacatagtgtgtcgtttaagttcgttcttgatttcggcggcaaagatagaggcgggtgctgacagcaaaaatgaatttccattattaataaacttcatgagatgctccactcggcgcaggaagtgtacaattacagcggcatctacatcagttacagcctctcttcctcctccaatgccttaaaggtagagccttacctgataacccctgccgacagcaacgaccacgtcaaagtggtgcacatgagcgcctacaacaccacccacttcggcactgctgtcttcaacaaccaccagaatgcctatatcttcttcaacgaacgcgaggcgccccaactggccttgtccaccatctacctgcaactgcccatgtacgactttccccacctgctcaaagggctctacctctgtctggactacaaccgcaaccccatagcccgccgcatcctcttcatcaaacactcggacagcacctccatggacgacttcctggaactgaaaggccaactcatcccccaagaccagctgaccgacgagcaacgcccctactacaactacacctgccagccgggcgacttcatcaaaacctgctccgtcccctctcccctgctgaacgagaaagacctggaacgggagaagcggatgctggaaatctaagacagcccggacagtccgggaattttcactttgcaaccaagttgcatctcctttccgctacctttgcagcagaaaatagaaaataggaggaaacaatatgagttgcaaatgctgctgcacacacggacatacagcgatacaaaaaaaaagaaacagtctgctgaaagattattggagaatcatcctctccgccctattgctcttcggagggctcatcctgaatgctactgacgccaccttcttcaagggagagtatgtaccttttatatggtacttgcttgcctatctccccgtaggcctcccggtgatgagggaagcctgggaaagcatcctgcaaaaggacgtgttcagcgaattcacccttatgtccatcgccaccctcggcgccttctatataggcgaatatcccgaaggcgttgccgtcatgctcttctactccttgggagagctctttcaggacaaagccgtagacaaagccaagcgtaacatcagcgccctgctcgacgtacgtcccgaaacggcaacggtcatcagaaacggcagtacgcttgtcgaagctccccaacgtgtgcaggtaggcgaaaccatcgaagtaaaagccggagagcgtgtccccctggacggaacgatgctggacgaagttgccgccttcaacacctccgcactgacgggagaaagtgttccccgcaacatccgccagggcggggaagtgcttgccggaatgattgcgaccgacaaagtcgtacgcatccaagtcaccaaacccttcgagaaaagtgctctttcccgtatattggaactggtgcagaatgcctccgagcgcaaagcgccggcagaacttttcatccgtaagtttgcccgtatctatacacccgccgtcaccggactggcggcattgattgtactgctccccttcctctattcgctggcagatgcacaattctcgttcatcttcaatgactggctatacagggcattggtctttctggttatctcctgcccgtgcgccctcgtcgtaagcattccgttaggctacttcggaggaatcggcgccgcctcccgcctgggtgtcctcttcaaaggtggcaactacctcgatgccatcacccaagtcaacacggtggtattcgacaagacgggtacgctgaccaaaggcaccttcgatgtacaatcctgccaggcacaaccgggagttacggaagagaagttgatacagcttgccgcctcggcagagcgaaacagtacgcaccccatagccaaagccatcataagctatgccaaacaaagggatatagagctgattgccacaacggacgttacggagattgccggccacggactgcaagccactatggatggaacgcgtgtcctggtgggcaacacccgcctgctgactaagttcgggatagaatatcccgatgaattgtcatcaattgtcgatacgattgtggcctgcgccatcggaacaaaatatgccggttatctgttgctatcagacacattaaaggaagatgccgtcaacgccgtcaaagaattaaaagctttaaatatcaataatattcagatattatcgggagacaaacaagccattgttactaactttgcagaaaagctaggcatcacccaggcatacggagacctgctgccggacggaaaggtgaagcacatcgaggcactccgcagcaaccctgccaaccgaatagcctttgtgggcgacggcatcaatgatgccccggttcttgcccttagccatgtgggcatcgccatgggcggacttggcagcgatgccgccatcgaaaccgccgatgtagtgatacagacagaccagccttcgagagtggccaccgccattcatgcgggcaggcaaacccgccggattgtctggcagaacatctcgctggctttcggagtgaagctgcttgtcctcatcctcggtgccggtggaatcgctacactttgggaagctgtctttgccgacgtaggcgtcgccctcattgcgatagtgaacgccatacgcatacagaaacttattaaatagaaaaaatggaagaaaagaaatatttggacctattggccaaaagggacatacagcccactgccatccgcatcctggtattgcgcaccatgatgcaggcaggccgttccgtctcattgctcgaccttgaaaccatgctggatacggtggacaaatccaccatcttccgtacccttaccctattcctctcccatcatctgatacacagtatagatgacgggacgggttccttcaagtatgccgtgtgcagcgacagttgctcttgcgacgtaagcgacctgcacacccatttccattgcgagaaatgcaacaaaaccttctgcttcaccaacattcccactccggtggtgaagctgcctcaaggatttacactgaacagcatcaactatgtactgaaaggcatttgtccggactgtgcagcagaagccaaccggggggcttagttaaaaaataaaaatccatgcagtcattcatgttcttctctatccttaagaaataacattgagacaaacacatggatacaaaagctcttgtcactttatgccagaagggaaacgggcaggccttgagcctgctctacgcaaactattcagagaaaatgctgaaagtatgcctacgctatattcccgacccaacgatagcccaagatcttcttcacgacggttttgtcatcatattcacttccattcattcgctgcgcaacccggagaaactggaatactggatgaaaaagattatgagaaacctggcactgcaatacctcaaccatgccaatgccaaccccaccatcccattgacagatattccggaagaggaagagcctgctgaaaatcctttttgtccggatttcatttcgtacgataagatgctggatatagtggagagccttccggagggctactgcaaggtatttaaactggcagtactggaaggattgtcccacaaagaaatcggagatttactgggtatagcgccacactcctcttcctcccaattgttccgggcgaaaattttacttaaaaagatgctggcaggataccgtgtattcattgttttgacagcattgcttctctttccaacgctatatgactatctgtacagagagaaaaagagtatcagggaaaaccgtttgtccaaagtttcttccaggcaagccgggagtacgcaacaaacaaagaaaaccgatactcctcgaaccgacgaacaatgctataccaaagaaaatctgaacaaaagggaacgaatcatccctcccgttccagtttccacagaatggccccttgccatacccacaatgaaagatagtatccacaaatatcccataccttctccattcaccggacagaccatcaccaaccgacagatggctttcgtcttctccccttccctgatgccgccaacccgcaagaagaaatccggaaaatggaagttgatgctggcaggttcactcggaccgcaactggcacagaacttatataagctgattgccactccacataccgacggcatttcaagtgacttccctcaacaagtcagcacgtgggaagagtattattcttatctgtacacccgctatcagcagggtactctgggaaaagattccatcggactcatgcagattgcccagaataacagcggcaggattgttgagaaccagcaacatcatgcccccatcgtcgtgggactctctctcagcaagaaattgaatgagcgttggagtctggaaaccggattgcaatatacgcttctcaggtcggagttcactaccggcgaagcattccgcattcaagacaaccagaagttgcattatatcggcattcctctccggctttcctaccgtttctggcattacaaacgtttctccagttatgccacggcaggcatgcaggtggatatccccataaaagggacactccaaagcttccatgtcacggacagtattccacacaagctcgacagccagccggtaagtgctccctggcagtggtcggtcaacacaagtataggcatacaatatcgcctcacaccccaggcaggcatctatctggagccgactataaactattacatccccgacggcagccaactgcgcaccatccgaaaggaacatccgttcacattcactctcccggtaggtctccgcatttcctggtaaaaaaacgatgcgccacgcagtcttttacccgactgattatctatttatatggataatcaaactcaagaaggaacaaagaacatgcagaaacgacataccgaccgggaaagctactttggtgaacagtcacagaccagcaagaactattatatcccctacataaaggaagtcatcggacacatccccgataaagtgctggaagtgggctgtggagagggaggcaatctgctcccctttgccaaagccggttgccgggtgatgggcgtagacattgatgccatgcgaatagagcaagccaggaccttcttcacccaaaggcatcagcagggacagttcattgccaccgacattttccagcttgaggacaaggctacgaattttcccctgattcttctacacgatgtgatagagcatatcagagacaaagaacggttcctctccggcctacaaaaacatttgtctgccgacggagctgtatttgtaggatttcccgcctggcaaatgccattcggaggccaccagcagatagcacacagccacattgtttcacatttcccttttctccacctccttccccgcactttatacagatggatattaagactatgcggtgagcaggaacacgcaattacggagctactggatataaagagcaccggatgcaccatcgaactgttcaatcgcatcgtccggcaagccaactatcaaatcattgaccggagactgtaccttataaacccacattataaaatcaaattcggcttgtccccacgaaggctcaacggagttattgctgctatcccgtatataagaaacttcttttgtacaagttgcttttacatattaaagaaagggactaaaactgttaatcactactgatttcccagctttagaattgattccgaaccatcaatttaagattatatattcagaagaaatcattaattttttgaatagctctgatgaaagagtgggtgtagaaaccctcataaactaaaaaatccccctcgctgcagatggttgtagcgagggggatttcaataaaagaggaacttgcacttcctcccttttaatgtttttacatcgttacttggttcattacagcctcgtcaggtgtcgttcctatttcatcggcaaataatatgtgggtgatagaccctctcggggtcggagtttcgattttaattctttgaccttggtacatctccggaatatcaaccagcttacatctatgggcttcgttattgccaaaactgacataatagtctttccctattaccagctttacaggtttacgttgagagaaatgagtcggacaaacagagctatccacttttatatctatcacaaaaccaagagcggatgttaccttagatagtatatcaatgctcacattataagcccctttctctatcttggctatattaacacgattaacaccacaaagattagccaattcctcttgggtcatatttctcttcttgcgaagaatggctaaccgactaccaatccgttcacgttctttcaaaatcttctctgtacattttccttcgtgaattttcataaatctgttgcagaatttaaagtgttgcccccacttctaatagttattggtttttgaacagacaaaagtagatattaattttgaattgtagcacatttactacaactattttctaaatgaatataaaaggtagggggagtagaagaaaagaaaaagcccctgaattactggaattcaaggacttacaaacttctttttactatatccgtggagctggagggtgtctctcgaacctttttataaaatttcacaggatatcaaatatcatgtaatcagttatttatctctttctttcattaatctaaatatctcttaatatcattgtatatctcatttttcgggtgtatttttgggtgtcattttcaaacacacccaattatgaatattaaaagaaatatcattttcgcaccggaaagccgcaaaaaagacggtattccagtcacaaagaatgtgccaatccgtatgcgtgttatctttgccagtcagcgtatcgaatttactacgggatatagaatcgatgtagaaaaatgggacacagacaagcaacgggttagaaacggttgtaccaacaagctaaagcaaagtgcatccgaaatcaacgccgaactattacggcaatacaccgaaatacagaatgtgttcaaagaattcgaggtgcaagatgtaatacccacccctgcacaaattaaggaagcgttcaacctaaagacaaaaggggaaaagaaagaaaaccatgaggaaaagcaaaaggttgaattagacttcatgaaagttttcaatgaatttgtagcagaatgtagcaaacaaaatgactggtcttcctcaaccctcaaaaagtttgcaacagtcaaaaaacacatttatacatttgaccctaatactacgtttgacagttggacggaaaaacatttcaatgactatatagaattcttgcgtacagaaaaaaacatgcgcaacacttccattgccaaacaaatcaaattcgtaaaatggttcttacgttggagtaatcgaaaagggtatcaccaaaacatggcttatgataaattcacgcctaaaatgaagagtgcacccaaaaaagtgatatttctcacccaaaatgaaataaataaactaagaacctgcccaataccaccaacaaagaaataccttgaaagagtaagggatgtattgctattttgctgtttcaccggattacgtcactccgatgtgtataatttgaaacgtagtgatgttaaaaacggtcatatcgaagttattaccataaagacggcagacagtcttattattgaattaaatgaccacagcaaggcaatactcgaaaagtacaaaggtgtgccgttccctaatgacagggcattgccagttgtaagcaatcaaaggatgaacgaatttttaaaagaactgggacaactggcagaaatagatgaaccaatacgagaaacatattatagaggaaatgaacgaatagacgaagttacacctaaatacgcattattaagtactcacaccggaagacgaacatttatctgtaatgctttggcacttggcattccagtacaagtagtaatgaaatggacgggacacagcgattacaaagcgatgaagccctatattgatatagcggatgaaatcaaaatcaacgctatgactaaatttaatctgatataactatggacgaaagaataacatcaatgataccccactacgggaaactcaacaagatatataccgaaataatgtccggcggcagtttctcttttgagaagcagcaattcatttccggcttttacggagagtacggggacacgcagacatttgaaaccgcactcatcagcctcatgcttgaaatggacgccgcacacttctccatattgctgaacagcctgaaacgtgagattgaaagcaacatctcgacttacaacgcctgcagggagtttttcgaccgtctcgataccgaatacgtctgccgacggcatgaaagccgttttgactgggacatcgacagacagatgaaagtcacaaacggatattaccgggaactcatggaagccaacggctctttggaagcggtaggcttcagggagcatgaccgtcaggaagaggaactgctggaaagaaggtacgaacggtgcaagcgggaatacgacaaggaaaaagccaaactggatgaactgtacaaacagaaggagcaggcaaggcgggaagccctgcaatgcctgaaaaaccgttgcggggacatttgcagactgggcggctcactattggcaatccttgaaaaatacctgaccgaccaaaagaaaaaggagggagaggaaaaggaagccgccaccacaccgacaagccaacccgcctacttccccatgaaacttttgtcagccgtttacgaaagatgcaacggtgagcagttcgaagccgtttcagaactggacttctacgccagcatgaacctgcaaccatgcgaaggcagactgaaaataagaccgagggagaaagcccgtgtatgctatctcattttccttatgggtgaaacgctgcccaagccggacagagaaaaatggaaaggggacatcatgaacctgctgggaatagacgatgcatactacaagtcaaaatacaaagagcccgtttccgatttccccagtgacagcaatcaggtatttgcaaaggaaatgcggtcaatattccgatagtcggtgatatgtcccgacactccacgacacgaccacttttaccactcaaaataatttccgccaccctttattatcttctgatatttagtgagatagcgtgaaaccacaatcacgctatccacatccttaccacccgtacccggaactaactttgcactgttcgaacgaggtaaaaagcccatgcgcagggcttgcagtacaaacgttaattcattctgatatggaaattagagaccttttatcaaagcccgtatggcagatgacgggcgaagagttcatattcctgaaccgccatgccttgcaaggaagcgaaacgaagccagcccagccagcagccgacaaggacaagaaatacgtgtacgggataggcggcatagcccggctgttcgggtgcagcatacccacagcaaaccgcatcaagaaaagcgggaggatagacagagccattacgcagataggacgaaaaatcatcgtcgatgcggacatggcgcttgaactggcaggacacaaaagcgggggacgcagatagggaggtgcgatatggacaacaaggaaagaaacatcacgcccgaagaggcggtaatcctatggcaagcctcacggctcgacctttcggaagactacgagaaggcacccgaaattctgaaagtgcgaggctccgtcatcggtacgctggggaatttcagcgcgtcaatcggaaaagccaagagcaagaagacgttcaacgtctccgcaatcgtggcggctgcgctgaaaaacgggacggtactaagctacacggctgaactgcccgaaaacaagcggaaaatactctatgtggacaccgagcaaagcacctaccactgcgcaaaggtggcaaaacggatattgcgcatggcgggactgcccgcagacagaaaccatgaagaccttgaattcctcgtcctaaggaagtacacgcccgaagagcgcatagcaatcgtgagggaggcaatctaccgcaccgagaatatcgggctggtagtcattgacggaatacgggacatggtgcatgacatcaacaaccccggtgagtccacaacggtaatctcctatctgatgacatggacgggggaaagggacatccacatccatactgtcctgcaccagaacaagggggacgagaatgcaaggggtcacataggaaccgagctaagcaacaaggcggaaacggtgctgcaagtggagaaggacgagaataaccccgacataagcaaggtcaaagccgcacacatcagggcggtggacttcgagccgttcgcattccgtatcaatggggaggcactgcccgaactactggacggctaccggttcaaggagaaggagccgggcaaagggaggaggggaaaattcgaccccaacaaggacatcagcgagcagcagcaccgcatcgcactggaagccgcattcaccctgaaagacgaatacggctacaaggaacttgcgggagtattgagggatgcctacgcctctgtgggcgtcatacttggcggaaacagggtgacagacctcattaccctattgaagaacaaacggatgatagtgcaggagaacggcaggaaatacaccttcaagcccgatttccactattagcggtatggcatgggaaccactttactttagtcacgtaccatatatatacggaaataaagtaaagtggatatagcccgtaacatatagagaggtacgggcgaaaacaaaaaaagatgttcacaccgcctgacaagaaaaacagcacgggcatgacagcccggaaccgctttactttagtcagggtgcatatatatagcgaaataaagtaaagcggatgcagcccgcagcatgcagaaggtacgggcgaaaacaaaaaacaatatccacttaaacagaaacccacatgaatacgaatgaagcgaagcggatacgcatagaggaatatctgcacagtcttggctacagcccggtaagacggcagggcaatagcctatggtacaagtcacctttcagggacgagtgcgaaccgtccttcaaggtgaacaccgagcgcaacctatggtacgattttggcgcgagcaagggcggcaacatcatcgcactggcgcaggagctctacgcatccgacagcctgccctacctcttggaaaagatagcggagcaggcaccaaacgtgcgcccggtctccttctcttttggcgggcaacctttctccaaaccgagcttccgacagttggaggcggtgccgctttcttcccccgccctattctcctatctgcggcagagggggataaatacggaactggcaaaaagagaatgttgcgaggtgcgctatcaaactgacggcaagccttactttgccgtcggttttcccaaccgttcgggaggctacgagatacgcaacaagttcttcaagggctgcatagcaccgaaggacatcacccacatacggcaggaacagacgaaggagacctgctacctcttcgagggcttcatggactacctctccttcctcaccctgcggctggaaaggtgtcccggacgccccgaacttgacgggcaggactacattgtgctgaactcgactgccagcctctccaaagcaatccacccactgggcgattacgaacacatccattgtttccttgacaacgacaaggcgggaatggaagccgttcaggaactgcgggaggaatacgggatgcgcatacgggacgcatcgcacatatacggaggctacaacgacctgaacgacttcctttgtggtaaacggtcaggacaagcggaacggtggcaggagaagccggaaccggagaaaaggcaacggcaggcaaggcaaccggagaggaaaggcaaaggcatcgggatgtaaccgcacatgccaacggaaggctttaaaaaagccatagctcattagggctttttcttcacgcaatgcacgcatcgctaaaaaagccccaatgagcaaaagggacgccgccccttttgaaaccccgtgagccatgcggcatggaagcaaggcaggggaagtattaaccgaaaaatgtattacagttatgggatatgcagttttgcatttggaaaaggcaaaaggtgcggacggcgcaatgtccacgcacatagagcgcaccgtacacccgaagaatgcggacagaacgcgaacgcacctgaaccgggaactggtacagttccccgaaggggtaaggaaccgtacgcaggcgatagcgcaccggatagagacggcaggcatcaaacgcaagataggtaccaaccaggtaagggcaatccgggtgctgctcaccggaagcaacgaggacatgaagcgtatggaagaggacgggaggcttgacggctggtgcagcgacaacctgaaatggctccgggaaacatacggcgagcggaacctcgtgtcggcagtcctgcacatggacgagaagacgccgcacatacacgccaccattgtaccgatagtgaccggggagcgcaggaaagccagacaagacgaacagaacgggaagaagaagtacagaaagaagaacacgcaggatgtgcggctgtgcgccgatgacgtcatggcaaggcacaagctgaaacactatcaggacacctacgcacaagccatgagcaagtacggcttgcagagaggcgtggacggttcgctggcaaagcacataccgacctcgcaatattacaaggaactggtggaacggcaggacagcctgcaggagaacatcgaaaacctgctggggctggaagaggaagcgcagaagaagctgaaaaaggtcaagggggaaatcaacgtgcagaagatgaagggtgcggcggtgaacgcaaccacagccatagcggacggggtgagttctcttttgggcggcagcaaggtcaagaggctggaagcggagaacgaaaatttgaggcaggacattgtggctctgcaaaagcaggtacaagccgaacagagggagcagacaaaaatggagaaccgccacaacagcgagataaacaagatagaccggagctaccagcaaaaaatcagggaatacgacaacagactggaacagatagacacctatttccctatcgtgaaggaactgttgcccataaccgaacaatgccgggaagtggggtttaccgaggaactgacaaggcgggttgtcagcctgcaacccgtggagttcaagggaaggctctattcgaaggaacacaaggagaagttcagaacggagcactcgacggcaaccgtggagaggaacccgcaggagaaagggaaattccggctgtgcattgacggcatgcccatactcgaatggttcaaaatgaagtttcaggaactcaaagaaaagctgggtgtaagccacaccccaaaagaagagaacaaaccgaaaagagggttgagattgtaaaacgtaataaaaaataggggctttggtttcatttatttagctgttttttgtatttttgtattggattgagtatgctctttccaagacatattagaatttttagaagcgttatgcttatcttgtagatgaaaacgtaggaaattttcaaagagtacaaggatagcatagtggttctcacgctatagcgtgggctgctatatccatatctgtactcaaggtattttcctacgaccttcatctaagacgtggcatgcagacccacgcttctttttgtataactctgcttagtggggtctcaggcggctatatatgaaaccaacaacatgatttcacaagatgaattttctttatttgaccctcaaaaaatgagagcttcagtcttacctgacaagcccggtaactatatcatagtattacgtagtacgtcctcattgcccataaaagtacaaatttccaccactcctatactaacctcttttgattacaaaaaagagaaatacaatgtcgtgtatgtaggcaaaagcagtaaaagtctgcgtattcgtgactacaaacaacatttcactggcactgccggaaattccacaattcgcaaatcattaggatgtttattgggattcaaactgattccaagagacataaactctccccaaaacggaaaaactacatttggtgaatttgacgagcgtacactgaccgaatggatgaaagacaacctgctacttttttattatgcaaataatgattatgcaaatgttgaaaaagaattgattcgcatatataatcccccgcttaacttgcaaggaaatttcaataaaactaatcttgatttccgcaaggagctttctgcgcttcgttcatgcacttcggcgaaacaagccccaataccaaataaccaattaaaactaaatacctatccacaacaattgcaatgcagcaattgtggtataaatctaacaattgatgaagggttaaaaaataagaagtacattaaatgcctttcttgtggttgtattattcaaaatcccatctacatacaaaataaaaaaaataaagaacgccgacaatggatagcggtattgatttttcttgttgtggttataattttcaatatttcaagtagagaatacagcacttcttcaaagggtaacaatagaatcgaaaactacgggagcaacaaaggaccatctcaaacaaaagctatggcaggagtaagggtctatcttaaacggcattatcttaaagaccctgatagttatgaaggaataagttgggaagcctttggtatatataataaagacaataatacttattttgctcttcataaatatagggctaaaaacagttatggcggttacgtggtggaagagaaactttttgtattggattctgacgggaatgttataaaagttgtagatgacatgaatgaagtcattaatggttattgatataaacaatgaacaaacaatgaagttatgaaggagcaaaatactgaaagactttctgaatatgagaaagcccaaatagagtttgcaaaaggtaaagcggagtttctacaaggatgtggcggttgcctgatgatcccaatcatcattatcattctactttgtatagtaattttaataggtctaatcgcttctccttttatggattaatcaaaaaatttaattctaacttaaataatatggcattatgaaaaaaattattacttctattttcattttgatgttttatcttggttgttcaccaccacagaaggatgtactgtttgcaaacgcttccgatgaacaaatcatagaatggggtaaacaatacgtagtccattccattgaggatagtttaaaagaaggagaaagttacaaaataatggaatggattttggcagaaaaaaagacaagtattcccgttgaggtatggcaaatggataatacatataaaaaagattcaatatcaggatgcgtcaagctattagatacacgaggtattttcgatgaactcgcatttataggaaatggtgatagcgcatttgtagccttcgctgttgcatatacaatagatgaaaagaatgggaatagttcattcttagaaaaagtttttaccctcgataaaagtggtaaagtgttggattgtagcgattacctcagcccttctcaaaagagaaaacaaatagaagaaaattttaacagagctttggaacagatgggtcctattctgattcagacggtaaaggaaggtgcagctatggctggtaaagatacaagcaatgtaacaagtataacgattaatggaaagacatattccgaataatttataatattacgtattatgaagacaaatgaacgtattttaagaatcaacagtgtgttgcgagattattttgcgaaacatcctcaaagcggaatgatccttgcaaaagagtttatgcctctttttataaagaatggcattttcaataaagataatagagaggggttacccattcgaaaagttctgcgagatttggatactgaaaattcattggacaaaattccctatgttcatactgaaaggaaacctaaaacaatcaattggtattttcgtcctttgcttttatcgcttgtaatatttatgggtatgctttcgagttgttcttttaagtcaaataccgatttcccaaaagtgacccatgtagctttccaaaaagaaaaacatgggaaatggggtatggttggagttgatggaaacatcttgtttgaaaataaatttgacaaaagaccgtcttatgcagtaaatggagtgtttagaattcgggattatgatacaaatcaatatctttactattccgcaactccaactccccaattaataggaactcccaaaggttataagcaaggaggcatatgtagcgaaggaataattcctgttgtttctgcggatgaacgtattcactatctaacagaaacgggagaaactgcattttatttgcttccgtatcagggaaaggaattcttatgtgtatctccattctttacggagcaacgtgcttggtttcggttagaaaatcgtaaatgcggatatatagatccacaaggcaatgttgtgatagaacctatttatgataacgctttccctttccatgaaggaaaagctattgtatataacaaagaagctgacaaatggttagttatcgaccccaatggaaaagaattatttgaagccagttccaatggataccaacaatattcatacaccttttttgaaaacggatattgtttaatagaaaacttcttactcaatgaaaaaggcgaaaaagcacagagattcccctctaatatttatagtatttcacctttcattgacaatgttgctttatttcaagacagtaaaactggattatggggacagcttaacatacaaggagaaagtatcggagagcctaaatattcgcgagctttaggtattgtaggtgattggatatatgttgctgatacaattgctaatttaaaagatgactgggataatcaatatatgaatgtatatgcaataaattctaaaggtgaaattaaaaataaaatagaaaacgtttcatgtttttacccattatcccaatatatcataatggcagaaaatgagaaatattactttgctgacaaaaaagggaatccaatagacaacaactcttattacaaaatttcagttcccccatttacaaatgcccccagttactcatccttttggtcttctttaatagcacctcactccttgtctgattatgatgcttggggagttgcaaccaattatatagatgaaaagaaaacattggcatcaatattcgataaattaacatccgacggcattgacagcttaaaaattggtcaaaccattccaaaaattatggatttatacaatataaaacaaatgccaacaagtggaatgattgacttgcataatagagattggggcataaatcaggtttttgcaacgtattccgttggcattcttcatgaatgtgagtgtgtaattgtgattaaagtaaagattgatgcgagtgcttctccgataggtgataatccaaagaaattgtttgatgctataccacaatatcttacagaaactttgggattaaaaagggaagatgaaaccctttatcgatctgaagatgcttgttatgatattgtttattatgaaggagaggattcattctttttaatgtctaaagcgataacagagaaatagttaagaaacattcatataaatcgaacacttaaaaatattcccgtacagaacatcaaattctgtacgggaatacttttatacataaaaaataattatctaagtattgtggacctggggagaatcgaactcccgtccaaacgaggaaaccatatgctttctacatgcttatctttgcctaaaattttcgaacataagcaagaccaaagccaccaacttatgccttatcctctaaaatttcgtaagagttacgaggaaaaactcaaactattcccgattttactgtgccactttatcaaacgcttcggaacaagagcttttgagtgacatctcgtttctaccactttggcggaaataaagctaatctactatacttcgattaagcagcgagagcataattttcgttgccagataaaattttgataactgatatttaagtggaaattaccgacccactgcatgcttacataccattccaactcgctgtcaattccagtcaagccctaatgatgtttcaaagataggaaatcgccttgataagaacaaacaaaatgataaaaattaaaatagaatatcacaaatcatcacaatagttaatttatttaagaaaggcagatagcttttgatataaagaatgataatcagactatcatttttatttcagggtgcattttggggtgtaaacaatataaacacctgattatcaatattgtttatggagctggagggaatcgaaccctcgtccaaacgaggaaatcataagctttctacatgcttatctttgcctaaattttcgtgcagcggcagaaccaaagccatcaaccgttgccttatcctctaaattttcacccgcgccacgaggctgacacgaactatccccgatttgactgcaccactttatcggaatgcttcggagcaacagcttccgagtgatgtcacgtcccagcacctggtgccgggattaagcttcaatctactatacttcgattaagcagcgagagcgtaacgagtttcgccagataaaattttgaggactgagattaaagtgcaaatcaacgacgcactgcatgcttacttaccatttctgcccgctgtcaaatccagtcaaccccatgactttgtaacggtctgaaatttaaaagattgcgtaactcattgctaagtagggagggtgaaaaagggataaatgctactttatttttcatcctctaccgctttctttggcccaaagatacatattcttttattagcaatcaccatatatttacaaatattagctaatactgacttttcgtgataaaaacaataatcttccatacatagaatatgtgcaccccattgtcatcaatgttcaaacagctaccaaagccagtatccgttgacggaattaccccctgcaagagggaatatctatcttctgtaatggatatttgcacaaaagagatgggaagttaacggaaaaagtctctgaagttaactgaaaaaccggaaagaattaaggaagcaatctatcccaaactttggtttttccatacccaaccttgggatgtctaaaccaaggttgggtttagacatcccaaggttgaaaagaaagttcttccgtacaagcaacaattccgccaacagattcctattatataaatacaccctcgtttaacagatgtagccgtaatacttgtatacaccgcgattgcatctacttttcaggttattatagtgttctctctttctttttaaaagtgaatgatatgtttcgtctaataatgatttgaattccccggtagcgtcttggaggatatttttagtaagaggaagacccttcggacaataaaagccgatacttcggactattttatccctttatttcacacattagccgtatttttgtcaacaaaagaaactataataaccaagagatttttagaacatatcatgaagaaccttatagccctaaccctgctgcttggaggaagcacactgctctgcgcacaaaagcctgccaaaacaccggcaacctacaagccggtgaaaagtgaaatgtaccgcaaaggttggatagacttcaacaaaaacggagtgaaagacgtgtacgaagacccctccgccccgctcgaagcacgcatcgaaaacctgctgcaacagatgacgctggacgaaaagacctgccaaatggtcaccctctacggctacaaacgcgtactgaaagacgacctccccacccccgaatggaaagagctgctctggaaagacggtatcggcgccatcgacgaacacctgaacggcttccagcaatgggggctgcctccctcggacaatgcctacgtctggcccgcctcgcgccacgcctgggcactgaacgaggtgcaacggttctttgtggaagatacccgtctcggcatccccgtagactttaccaacgaaggcatacgcggcgtggaaagctaccgcgccaccaacttccccacccaactgggactgggacatacctggaaccgtgaactgattcgccaagtaggactcatcaccggacgcgaagcccgcatgctgggctacaccaacgtctacgcccccatcctcgacgtaggacgcgaccagcgctggggacgctacgaagaagtttacggcgaatctccctacctcgtagccgaactgggcatcgaaatggtgcgcggcttgcagcacaaccaccaagtggccgccaccggcaagcactttgccgcttacagtaacaacaaaggcgcccgcgaaggcatggcacgcgtggacccgcaaatgtcgccgcgcgaagtggaaaacatacacatctaccccttcaaacgcgtcatccgggaagctggcatgctgggcgtaatgagttcgtacaacgattacgacggcatccccgtgcagggcagctactactggctcaccacccgcctgcgtggcgaaatgggattccgtggctacgtcgtatccgacagtgacgccgtagaatacctctacaccaagcacggcaccgccaaagacatgaaagaagccgtccgccaaagcgtggaagccggactgaacgtacgctgcaccttccgctcgcccgactccttcgtccttcccctccgcgaactggtgaaggaaggcggactgagcgaagaagtcatcaacgaccgcgtgcgcgacatccttcgggtaaagttcctcatcggtctgttcgatgccccctatcagacagaccttgccgatgccgaccgtgaagtggaaaaagaagagaacgaagccattgccttgcaggcatcccgcgagtccatcgttctgctgaagaatgccggtgaactattgcccttagacatcaactccaccaagaagattgccgtctgtggtcccaatgccaatgaagaaggctacgcgctgacccattacggcccacttgccgtagaagtgaccactgtgctggaaggcattcaagaaaagacaaaaggcaaggcagaggtgctctacaccaaaggctgcgacctggtggacgcccactggcccgaaagtgaaatcatagactatccgctgaccgacgacgaacaagccgagatagacaaagccgtagaaaatgcccgtcaagctgatgttgccgtcgtagtattgggcggcggacaacgcacctgcggcgaaaacaaatcgcgcaccagcctcgacctgcccggtcggcagttgcaactgcttcaagccatacaagccacgggcaagcccgtcgtactgatactcatcaacggacgcccgctctccatcaactgggcagacaagttcgtccccgctatcctcgaagcctggtatcccggctccaaaggcggaacagccctggccgacatcctcttcggcgactacaaccccggtggaaagctgacggtgaccttccccaagaccgtagggcaaatccccttcaacttcccctgcaaaccttcttcacagatagacggcggtaagaatccgggacctacgggcaacatgtcacgcatcaacggagcactctaccccttcggttacggcttgagctacaccaccttcgagtactccgacctcgacatcaccccccgagtcatcaccccgaacgagtctgccaccgtccgcctgaaggtgaccaacaccggcaaacgtgccggagatgaagtagtgcagctctatatccgcgacgtactgagcagcatcaccacctacgaaaagaatcttgcaggcttccagcgcatccacctcgaaccgggcgaagcccaggagctgtccttcaccatcgaccgcaagcacctggagcttctggacgccgacatgaaatgggtggtggaacccggcgacttcgtactcatggccggcgcctcttccgaagacatccgcctgaacggaacgctgaccgtagaagactaccagacccgtgccaaagccattgaagcccaaaaaccagcaaagcgtgtgagtgccagcaccaacccagaggatgccgaaaacgtgctcgacgaaaaaatcaataccgcatggcaaggaaataagggagattatattacctttgccttgaagaacggagccaaggtagataaagttgccattgcctttacacgtgacaacaacctgccggcaaccttcgaaatccagctctcgggcggtggcggacagttcctcaccgtatattcgggcaccgtcagcgaatacggcaaactgatttcctatccgttcaaaggcactaccgccagcgacctccgcatcgtgctgaacgatgaccgcgtcagtattgccgaagttaaattttaatgtgctaatgtgccaatatgctaatgtaccaatgaccatgcagcatatacagcgcagccaattagcacattagcatattggcacattaacacattaaattaatgaaaacacttcttttctgtatgctcggattaggtttgacagcatgtggctcttctccaaagggcactaacggtgaccaggacgaactcgccatgctaataggtacttacacgaatggctcaagcaagggtatctataccttccgctttaatcaggagacgggaacagccgttccgctcagttcagcggcattgcccaatccctcctacctcgtcccctcgggagatggcgaatttgtctatgccgtcagtgaaatgaacgacagcacagcagccctcagctccctttccttagaccgggaaacgggagaactgcgcctgctgaacaccgttcccaccttcggcgccgacccctgctacgtggccaccaatggccgggaagtgttgactgccaactacagcggtggaaccatgtccgtctttcctttacagaaagacggtactttggctcctgcagacacgctctttcaaggctctgccaccggtcccgacgccatacggcaagccactccccacatccattgcacggtcttttcaccggacggaaagtatatcttcgccaccgacttcagtgccgaccgcatcctgcgctttgtgatgcaccccgacgaccctattcctcatgcttctctggaagccgttgacattgaagcggattccggcccgcgccatctgacattcagccctaacgggaagtttgcctatctcatcaccgaactgtccggtaaggtcattgccttcagttacgacgacggctgcctggaacagatacagactatcacagccgacaccgtagccgcccgtggaagtgcagacatccacctcagtccggatgggaaatacctctacgccagcaaccgtctgaaagaagacggcatcgccatctttgccgtgaatcccgaaaatgggaccttggcaaaggtaggttatcagcccaccggcatccatccccgcaacttcaacatcacgcccaacggtaaatacttgcttgccgcctgccgcgacagcaatgtcattcaggtatacaaacgaaacgaagttaccggactcttggaagatactcatcaggacattgtagtcgacatgccggtttgcgtacagttcgtcagctctgttaataatttataaagcaatatttagcaaagataacttcattaactttgtcccttagctaaatcagtctaaacgaatgtacattatgaagaagaatatattgatgctctcagctctgttcttgtctaccactgccatggcgcaaacagacgtaaccaccggtgtgatgcgtggcaaagactacggagtgacttatatgttgcccaaaacagaaatagaaatcgtattgcaagccaccaaacatacttacactcccggagaattttgcagatatgccgaccgctatctgcgtctcaacaacgtgtctgccgaacccgaggagttctggacactggataagatagaaacccgcatagccggtgtaccggataaggacaacgtctatttcgtgaagatgaaagacaagaccgtagcaccccttatggagcttaccgaagacggaattgtccgctccatcaacattccgttcagcggcaagcctgctgccaagacgcccgaagccaaagccaccgaaagcaacattgacccacgcagttttctgacggaagaaatactgatgtccaactccagtgccaagatggccgagctggtggccaaggaaatatacagcatccgcgaaagcaagaatgccctcctgcgcggcgaagcagacaatatgcccaaggacggcgcccaactcaagctgatgcttgacaatctgaaccagcaggaaacggctatgacggaaatgttctcgggcaaaataaagaaagaacccaagacattcaccatccggctgacgcctaaagagatgaaagatgaggtggctttccgtttttcccgaaagctgggagtggtggccaataatgaccttgccggtgaaccgtattatatcagcgtcaccgacctcaaaagtcccgatgtatctgccaccgaggaaggcaaaaagaaagtggacggtgtagcctataaccttccgggcaaggcacaagtgacattgatgtataacaataagaaattgtttgacgaccaacttcccattacccaattcggcaccgtagaatacctcgcaccggtactgttcaacaagaattctaccatcaaagtgctgtttgatacggcaacgggaggattgataaaagtggatagggaataaaggaattctaattccggattgtcaactggataaatccatccttacgcaactgcattacgtaggcggtgacccggggaatataattctcttcctccccaaagtgcctggcaagtagagagatgatttcgcgcacggtacgatgtccatctatcagattccagacagctgtaccgtgttcttccagcctcacatggatgtcaggagacatccccttcggcaataaaaaacgacgcatccattcgtatttaaaccgtgggtaggcgagtacggcgcactcaccttcccattcggttgttatatgtccacagcggaccggaacagcgtccaacagacttacttttccttcgggtatttccatcatacggtatccgcttttcctattatttctgaatattaggctcttccagcttataaccatacttcttgtctgccttcttcagcagtagagccactataagggacaagcaggcaataccggtaaaaatgcacataggcaccgtatagtcatacatattcgttccatctggtttcttgccggatatacaataggcatcaagcacccaccctatcaatgtaggaataccccaaagaccgatattctggataaagaaaatcaatgcgtatgccgtacccaactggcttaccgggaatatcttggccacagccggccacatggcagaaggtaccagcgagaaagcgatacccaaaattatcatcagcacaatagctaccagccaatagtttatatcgggaatagcataaatgaaatgcacacatatcagcatggccgagcccagcagcatgatagatgcggacttgccccgcttgtcaatgaaaccaccaaagaccggagtcagaatcagcgctcccaatgccggaagtccggcaaatgtaccggctacattctcattgataccgtatttgataatcatcaactcggaagcaaacttctggaatgggaatacacaagagtagaacaatacacacagcaatgctatcagccagaaaccgggattgaccagaatattcttcacatccttaaaagagaacttctcttcctcatcttccgtaccggcagcaatggcagcagcttccatctgtttgtccagcttcttgtccatcactgcaaagatgaagaaagcaatcataccgcccaacaacagaaccaaacccaacaacaccggtgtggaaataccgaaagcgcgggccaaaggaatggctacggcataaccggcttgcgaaccgatacgtgctaaagcgacttgtacccccatagccgtggcaagctctttccccttaaaccacttggctatgattttggaaactgtaataccggcgacctccgctcctactccaaaaatggaataaccggcaaaagcaacaaacacacccgttttatagccaaatatttcattgattccgaataaagtcgcgtcggcaccggcaagtcccgtcattgcatagtattcaagtgctgtaccacctaccatcaggatagttgccagctttccggtgaaacggataccaaagcggtcgaggattaatcctccccaaatcaacatcaggaaaaaaacattcagaaaactataaccaccggtaaagaatccgaaatcggtactcgaccaagccaagtccgtttccaacattgtcttcaacggtgctaccacgtcgtttacataataagctgccatcatcgtgaaggcaacaatcaccaatgccccccaacgggtagccttggaatcattcaatttaagtttgagttgttctgtcattgtactatttggatttcaatttattaatcagattgcataaattgctgacaaaggtaaataaatacttcatcaaaacgaaaaaaggctgacaccttttcagtatcaacctttctcttatttttccaagcgggagtcatccgcaatatccttatcttattctgctgcaggggcttctgctgcaggagcaggagcttcagccggagttgtagctgcaggggcctccgattgcggagcttctgtacctacgggcatgttataaggattagttttttcttcttgttgcgcctgttccagaatcacatcaccgcccttgcctgtggaagaaggaatagtgtaagcagaaacaatactgaagactaccatgacagctgccagagtccaggttgctttttccaaaaagtccgtagtcttgcgcacacccataatttggttggatgatgaaaagcctgatgccagaccacctcctttagaattttgaatcaatacaatgaagcacatcagcacagatgcaatcagcattaagataactaataataaatacattttgttattttgatttagcgttaataatcaatttctccaaaaatctgatttggtctgcaaagtaagcatttttttttggataattcaaacttaattttttaataatttcaagcgccttgtcatatcggtgctgttttatatagattttggctaaagtttccgtaaaacagctatcgtccaactcttccgttaccggcgatactgagggttcttcctcttcttcagtctcttcctccttctctacaagaaactcccttctcgtatccgaggcatccgaagactcactcttttggataaagtcatctatcaattcatgcccgcgcagtttaggcacttccgactcatcttctgcatccacaccgggttcttcctgcattaaataggccgtataatccaccgcataatccagctccgtatgctgtgaatgctcttcgggaacagtagccagaaatgcgtcaatcaaggaaagggtacggtccacactcggctctttctccaaatcgccggaaaacagcgacgagaccttccgggatttcaaagtatagcggtcaccctctataaagtaaaacagcacacgacggtctgccacatacaacacagccttgcgcaactccgcgccaaagttgatgtcgtgcagcagatagaggtttttcagatagagcaaacggagcgactggaaataaggatagcgtgccaccaatgtgcgaagctcgtacaaagtatccctattcagcgtctcgggatgctgaatccattgttgcaaatgggtaggcgtcatgagtttaccagttagctacagttgcattgaaaatctgttcggcaatgtctttcaccatcaaggttatcagctggtcctgcacttcggtcagcaattttgaggaatcataggtctggaaagccgagaactgctgttcaaagtcctcctcatggttcgtgttattggtgtagcgcacgttgacagtcagcgtcaccttcaccttcgaagagtagccgctggcatccaccgattcattatattgattgtagccggttatttctccgtctatttccaggtctcctccggaattcaccagttgcaggcgagtctgctgaatgaacatatccttcattttctggttaaattctgttgccagcggtgcatatacatactctgcccggttctggaaatcggcaatggaaatcgtttttacctttgtatagtcgatagagcttatcggagcaagtcccaacttcatactacatgaattcaccagaaataacaagcttaccaacaaggaagcaaatgccgcttttttaatccaatccatattcttttatctttctgtataacgtacgctcagagatattcaaatcctgagccgcactcttacgcttgccgtgatgtttttcaagcgccttacgtatcatttctttctccacttcatccagggagagtgactcctccacatattcttccgtatcctggaaatcatcgtccaccggagtaaccggctttaccgaaggatgtataatggtggggacactggatgttaccggaggtaccaccgccggagtagccggcgtatagtaggccgatgtggcaaccgccggattggctaccgttcccctttcagccataatctcatgcaccagctttttcaagtccgttacatcctggcgcatatcaaacagaacctggtagagaatttcccgttcactcccgaagctcttgtcctccttcactccaaacaaggcaggcaggcgctgcatattgttctgctcaggcagatagcccttcagtatggatgcattgatttcacgattggtctcaatgatggatatctgctcggtgatattcttcaactggcgcacattacccggccatgagtagcccagcaacacttgcttgccgtcttccgtcagctgaatggcaggcatacggtacttttctgcaaagtccgaagcaaactttcggaacagcagcaccacgtcttcaccgcgttcgcgcaatggagggacctgaataggaactgtgttcaaacggtaatacaagtcttcacgaaaacgtccgtcagcaatggcttgtgtcaagtttacattggtagcggcaacaatacgcacatcggtcttttccaccttagaagaacctactttgatgaattcaccgctctcgagcacacgcaacaagcgtgcctgggtaggcaaaggcaattcgccgacttcatcaaggaagattgttccaccgttggcctcaccgaaataccccttccgttcaccaatagccccggtaaacgcgcccttctcatgaccgaacagttccgagtcaatcgtcccttcaggaatggctccacagttcacggcgatgtactgtccatgcttacgccggctgtactggtgtattatctgcggaaaactctcctttcccacaccactctctccggtaatcagtacagacaagtcggtaggcgctacctggatagcgatatcaatggcacgcatcagcgcttcgttgttgccgatgatgccgaaacgtaattttacttgttgtatttccgcttttgtcattctacaaatcttcttctacactatcgagtttcagtttgtcgctatcgtcacgtttctcgtaatattgcttgcgcagcggatttgcatgcgcctctttctcacgctggcggttacggaacacatctattgccacatagatagcctgccggaatgaatcttcagaggcaattcctttcccggcaatatcgtaggccgtgccatgagcaggcgaagtgcgtatcaccggcaagccggcagtatagttcacgccctcgtccatagccaatgccttgaacggtgccagcccctggtcgtgatacatggccaggataccatcaaaatgggtaaagttatctgagcccataaacccgtctgccggataaggaccatagcaaagcatacccttagcagccatttcgttgatggccggaatgataatctcctgctcttcagttcccagcaatccgccgtctcctgcatgcggattcagcgaaagcactgcaatacgcggtgcgctgatagcaaaatcctgcttcaaggagcggttgaatatcttcagtttctcttgtaccagttctttggtgatgcttccggctatctctttaacgggaatatgtccggtcaccaatgctacccggaagtcatctttcatcagaatcataagggccttctcgccatctcctaatttttgctctatatactccgtatgtccggggaaggcaaactcctccgactggatggtatgcttgttgatgggagctgtgacaatcacgtctatcattccctccttatattcctcaatggctttttccagtgcaccaagtgcagctttaccagcttcaacgtcaggtttagagaactcaacctttacttcatcatccgtgcaattcactacactcaagcgattgggaaccgcttcggaggcagagttgacgatactgaaattggtaggcaagtccaatgatttacgatgataagctgccactttaggcgaaccgtagataatcggcgtgcacaattccagcatcaccgggtctgcaaacgtctttaaaatcacttcataccctacaccattaatgtcgccttgtgtaatgccgactcttattttgttgtcttccatttttattacttattattagtagtatcttttgcggttacgcctaccggaatttccgcaccttcctgcttgctgccaggcagtttcaaggtatagagcgaagcctccatctgacgtaccagattacgtttcattttatcaggtgaataaataaatatttcagatacgataatacgctgattggctttgtccaaacgtacatgcgatacgaacggaccgcccatgaagtcaccctttatgcgccacaagccgcgggcctccaatgcatagtctccctgcacactgatggggcgtacatcggtcatcagagaatccgtcgacatatacatgccttcacgggcaccagggatgttagccttcatcacggaatcgcgtttatgaacaaaatattctttagtaaacgtatccttatccgtataaggataagagtagattacaaagttctggtcgccggtagctgcattcgtacctgcccagaagaagttctcaccctccttggtagatgtcagttcgcccggcacccatacatcgcaatcgaactggcttttcaccttcgttgctatatagtcgctatgcttgtccttcaatactgaaatctgacgattcatttccgcatgagtaaagaaatcgatgattacccgcctattctcctccacaaatttctcgaacgaagcctcgtccggcgcctgaatagtaagaatagactgaggagcagcatatacattccttgcatacttgaatttaggctgggtatagaggtccttgttcacatcgacaataatgatattgcgaatcagttttaaagtggcatcataattggaaggggcagtatacatgattcggaatgaacgttctgactggggaagccccggaacatcagaatcaagcacatcgaaaagcgccctaccggcaggacgttcccacaagccgggctccaccactaccagaacttcatacgcacgaccgctggaggtcggagtaaacacaccctttttaccaccaccgcaagcggaaaaaagcgtcagtacgagaaccatactcaaataaaacaagtgctttctcatatctctatcattttagtttttcacaaagctacgaagaatgcgtaatatcctccctacctaagttaataatttatattaattcttctttattctcctcctgcttggcagtggacaacatgccacaagcggcaaatatatcctctccacgtgatgaccgtatagtggtaaacagaccgtgcgaagtcagataatcacggaacgcagtcatgatttccatatcagccccttcaagattcactccaggtatggcatgaaaacgaatcaggttaatccggcagtccagcccgcgtagcagcttcagaagttcctttgcatacggtaacgagtcattcactcctttgaaaacaatatattcaaaagatagtctgcgctgtttgctaaaatcatagtttcttaacaattccacaatctccgtgatggagaaggccttctctgccggcatcagctcgtggcgttgcaaaggtatcggcgaatgaaggctgatagccagatggcagtccgagtcctcaataaaacgctgcaagcccttcttcaatcccactgaagaaagggtgacacgcttgggactccacgcatatccataagaggcggtcattatttccagcgctttcaatacctcgtccagattatcaagtggttcgcccatgcccatcattaccacattggtcagcttgtccctttcgggcaacgaactgatttggttgataatctggttagatgtcagattggcggtaaagccctgcttgccggtcatacagaatttgcaattcatcttacagcccacctgagaggagacacaaagcgtagcccggtcttcgtcgggtatatagacagcttccacgaaatgtcccttgcctgcccggtacaagtatttcaccgtaccgtctacagagcgcatggcatctaccggcgcttcggcacctacctcatagatttctttcagcaattcccgatgcttcaacgaaagattgctcatttcgtctatagaagtcaccttcttgccatacagccaggaagctatctgcttggcagagaaaccgggcattcccagattcttcaccacattctgcaattcagagagcgtcaagcccaatagaggtcgtttctgcatatcgtttttcattaaaaacaaaactctttcaagaatgcaaaggtaggaataaagttgcacaaagacaacggagagtatagaaaatgaaatgtacagagaatgaaaaagccgcccggaagtaccgaacggcttttcaatatgggttttctattcttagaagaataaataacgttggtcttttacgttggctttcagatacaagtcactgatgaactggcttgccatgcgtgcgtgcatgttagccaagttagcctcttcagtttccttgttgaatgtttcgttcagtttctcttttgcataaggttgcagaacgaatacaccaccattacccttgataggagcactcagcttgttcacttcggcaatagaagcgtatgcgcctaccagaggttcgctgctacgcaatgccgggatataggcaggagcagagaaagtaacgtgctttacagaatcactgacagcatttgccatattcttgtactgctcgaacgaagttgcattggcagccttcatatcagccataatcttctctgctttcttgtcacggagaatttcagctctcaactggtcctttaccaaagccagtgggcgataaccttcaggaacaatacttgcaacacctactaccagcatacggtcgctctcgccacattcgtacaaaccggaaacttcaccggcttttgcctcaaacgcccatttcaaagcatctttggtacctctgataccaccgataccatgttcagagctgtacaagtcggctctatccagcaacttataaccggcatcttccgcattggcaatcattttctctaaagtattgtttgcggcgataaactggctgaattcattgtatgccttgctgtaagtttccttgctgaattctaccggacgcttgataacggctaccttatatttatccttgacagccttcttgttggttacttgcaaaatgacatttgcttgtcccaacgccagattggtcagttcgttctgtcccaaagttgtgacagcggtaatgtatttcaagttgtcaccgtcaatctgtgcgccttcgtagttagcagaagaaatccaggtaggctcaccggtctgaccgtacttcttcgcaatttcagcaaagctggcaccacccttaatagcattgtagatgctgtcggctaaagtcttcgtcttttcagcatcttcggcagctacctgaatctgacggaactcgatagagtccggcatagcagcagtagccaatttcttgaaagagttaagagtattgtccgatacgttataataaggtccgaatacaccacccaccgcaacagaatccaaacgggctgtcacatcagcaggcagagacttagtagtgtagaacaagtctgtataaggagcttcggaaccggtagaacggatgaaggtagtatagtcagaaggattggcagtaagttgttcagtgtattcttccatttccttctggagagcagctctgtcttctgcacttgcagtaacttgcacatcaatgaacttgatattgcgagtttccacatattgcttgaactgttctttcttcttgtcgtatgcagccttcaaatcagaatccttgataacgatggtagagtcaacgatagaagaatagggaactgcagcaagcagcaggtctgactgctctactcttgcatcaaaagcgtcctgagcttctaccgggttggagaaaagggattttgtaatcaaagcttgatacttctcctgaagacgtgcctggataagggacttttcgaggaaagaccagaacttgtacatggattcatagtattctgcatattgtgaaggcatctgtgccttattcatttttgaatagtccaccaagaacttcttcaacatatccttatcaaacgcaccggtctgaggattacggaacggagtctgttgcagcatcggatgcacaccggcattaatgatagcctgaatctcagccttcgatacaaccagaccgagtttctttgcttccttttcaatcagcttattattgacgtatgttctccatacttcatctttgatttggtttgtctgctcatcgctcaatgcactgttgccactggagaacttgatgacttctgtatattcttctaccaatgcttgaaaatcctgagcggaaattgattccccgttcacttcacctacgtcttgtgactggtgtggctgaagcactttccacgcgtcacctgcgatgaaagcaaacagcgccaaaccaataacaatcaccaataaaggtcctttagaccgaatgttttgtaatgttgccattttagttaatatgatttatttgtttattattatttttctaacatgttcattttagcgcacgaagatacaaaaaatgctaatacgcatccatttattctttaaaaaattacgcctaaatgaaattattcaatgactttcagtctcaccaactcaattttggtagctgttaccttgattattttaaactgatagttatccacctcaatcacttcatgcagtttcgggaaactttgataacggttcagaatcagaccgcccactgtcagataatcatccgattccggcaggtcgagcccgaaagtctcatttaccttttctatttccagacgggccgaaagcacatattcacgctcacccaactgcttacacacataggatgtgttatcatgctcatcctcaatatcgccaaaaatttcttccaccaaatcctctaaagagacgatacctgccgtaccaccgaattcgtccaccactacagcaatcgtttttttctgctgcatgaacagtttcatcagtttatgggctgacatcgtttcgggtacaataggcacttccttcacgttgttcttccaatccaccggatttctgaacatctctgacgagtgaatatatcccaccacattatctatatttccatcatatactatgattttggaaatacccgactccacaaaaagacatttcaattcttccaatgtagtggtcaagtctacagctaccacctctgtacgtggtacaatacagtcgcgtatctttatattcgaaaaatcaagcgcattttggaatatctttacctctgcatccagttcttcttcactttccgcattctctatgctcgactggataaagtagtccaaatccactttgccaaaagccttggccgacgcctccttatttactttcatcccaaatatccgaaggaacagatacgacaatcccgatgcaaactttgaaatagggaacagaatgacataacatatgaataaaggaatagcacataccctcagcatcagattgggattgattttaaacaaagtcttcggcaagaactcaccggttaccaaaataataagagtggaaattacagtctgcaccaacaccattacaaaatgattggaaataattccagcaagaagattcacctctatgagttgcgccatcaagataccgtaaatgacaagtgcaatgttattacccaccagcatggtcgagatgaagttattcggattgcgaaggaaatgggaaatgatattggaagtgacgcctgacttcctttccatctcaaagcgcagtttatctacggaaacaaaggcaatctccattcctgaaaagaaagcggaaaaagccatggttatcaataaaaaaataacggtatccatcttatcaatttatggtatcagtctgcaagctgtctgctgcggcagtctcctcgtcaacatagaagatgccctccggcttgcgaatcgtgtaaacagtcatttgctgattggattcaaagccatgtcccgtaataatacggtcaggctgctcgatacggataaactcatccgaataaattctttgtgcccgctggtcccaatacagcagctctgtatcaaactgctcacctttcaaattctgtatatgcacattccccatcagtttccataactcctccttattaaagaagtaggctgtatcagccttgatactcgcctccacttggaagatagagtcgaacttctccaaatagacccccttttcaaaagcccagtaaggaggatttttccggtcaaagaccagccactcttccgtattgatgcgataacgtgttacacccgagtcagacaccagtgtagtcaccccgcgggtatccatcactgccatagagtcacgctcggtaatggcatctcccagctccttcttcttcccggaacatgaagaaaataaaagaagcataaccattgccccaaggacaatggttatgctcgcatttttatgataaacaacgttgatgggttgtagcaacatgattttatctgatagttgtagattcacctatccatccgccgatagtgatacggtcaccagctttgtaacccaacataaagaggtctttagcctggggagtgtggcgggaataagtaccaatcaattcgttagcacgttctgtaaccgaagggtccacagctttggctctctgcaacttgtcaattactacaaagtaagtacacttattcagagcaggctcgtcagtccaattaggattagaaccatacatttgtgccaaaaggatataaggctcgccatagttttccttaaaactgatagccttctggcagtatgctctcgcctgtgacagtttctttgcctgcatcaaggcagcagcagtagcatatgccatttcagctttcttgtcattatcggtttccttagccaatgcttcgtcaaaatatttcacggcattgtcatagtcgcctttcttatagtacatgtatgccacacctacagcagcatcggcagtcgggtcaatttgatacatatattcagaagccttgaaataaacttcactttcgttacacttcatcaacttcaaaatattcaatgctttcttcaagaaagtagagtctgtcttattttcttctaccttagggccatagatattctgcaaagattcacaatcagccacaccactctggatgaacatagctaccagattatccttgatagcttgcaggtttgccttctttgcctctttggtctcagctgcgatagcatcgtccgcatacttggaagcatcgatatagtcttggaagaactggtcagtatgattgtcatctgcctttaccttctgcatagagacatccagaaaatagtgcaaaaccgcacctttggaaccacccttttcagcttgaacagattctttcagccaattgtaagctgtattaaggtccggagtaggagcaaactgaagataatccacagctttagcgcccaaggcatcagctacactcggcacgcccttcattcccttactaatgaattcaggaatgtacttcattctcaaatcatatacatccatcaactcatcaaaatacttcttgtaatcagcagaatttctatccttaatctgactcaagaaacctactaaaatcttctgagcatctgtaaatgtgtaataccgcagtgtaggacaatccttcaatacagccatacaaggagcgtatgcatccttaaagttaccagctctcactgcttcatgagagatactactgttcgaattacaattttcagtctgtgcgaaagtgctggtcactccacccgaaaggagcaagacagccacaagcatcttaattttcattgtatttaaattttagttgttatattttttgtctattcaatttccattaatccactttacgcttgaagaaccagcgttcgttaaaggttactccgatacaaatgcgcaatgtattttcgttcaagaacgctgcctgggttcctttggttcgcacatattgcgcagaaaggctcaatacggaacgggttctcggtatgggtaatccaaaaccggcagtaacaccatattcatcagcggcacgtacaccgtctatcttataataaggtttggaataataagctcccaaacgatacttcacatgagacaaataacttcttcccataggattcggcagatactctgcaccaacggatattcttccacggtcgcaaaacgcctcgtcattgttcatatagctcactttgctccaattctggaacatcacatccgctcctaccgtcagacgattgtcgtacacatacgtcacacctgcaccaaatgttgtcggaatgccgcaagtaacaatagtgtccctcgttgccgatgtagctcccgtattactatcaccagtctgcgtaacttcgtacgcatcgttattcaaatcatgtcccggagaaaagacgactcccaacgttgcaacatgctttttcccaaactggtgggtgtactgcgctccaaaatccaacttataactctttacagccacattagactgtattgtaataggaaatacacttgaactggacggaaaggtttccgcagcggttcttgttatatctccccaaagatacgaaaaattcgcaccgacagaaagatttttaattattttaaagcctgcacctaaataaagctgatgcagacctccttctcccgaatagcttaccgtcgtagatttgtctgggaattccgtatcttcccggtactctcccatgctgtatcccacatttgaataaggcaacaatcccaagcttatggcagcccatttacttgcacgaaactgcatcgtgatataatcaaaactggaattcttggcatttcgtttcagagtaccgttactgaggtttgtattctgtagagagactgctccatcaaagataaaagtcaacgaatctaccgccgtataggatgctggattagcgaagttagtctggtacttgtctcgtaaaccataggcaataccacccatcgccctgctgttactagagccttgttcagacaactgtccatatccatatcgtgtatagggagaatttgtattattttgagcgactgccgctcctgataatatcgtgagcaagagcactaacagtgtttgtctatagcctgtcattattatagtttaaaattctatttaatcctttcaacactaaaaatctgtctgcaaagatgatactttttaagtttgtatcaaaagaaaaatcatccccgcccgttaaaaaaaccaaaagttcaggatatttatgcttcatagccgtaacgtaacctaaaatttcatattcaatacccttcagtactccggcacggatagctgtatcggtatccttccccatgggcaccatccgcccctcaagagccaccattggaagccgtccggtaaactgatgaagcgccttgaaacgcatctgcaggccgggagagatattcccgccatgatagcgggcagcagcatcaacaaactcataagtgatacaggtaccggcatcaatcaccagtatatccctgccaggaaattgctcattggctcctaccaccgccgccatacgatcataccccagcgtccggggagtttcatagaggttttctaccggaagagaagtcttttcattgagccacagaatagggacagccataccttccagttgcgacaacacctctctactcaaatcaatgacagtagccactatcgctttttcaatcgtatatgtacggcatacttcaggcaaccgttccaacgtcagattggagtcatacaccacctccacgatacgtccaccatcaaacaccgccatcttggcgattgtatttcctatatcaataatgagattcaccgtattgcataaatttagcggcgcaaagatataacattaatattgaaattcagcagaaaccacctctttattagaagaacaactgcacaagaattcttattcacatccgcaccaaacaatcacaatgccacttctacattctgttgaaatttattaaagccacagcatcataccacaaccatctgattatcaatacagctaaatgcgctacattcagtatacgactgagccctattcagtatacgattgaatggcattcagtatacgactgaatcaggttcaatatacccttaattccgcaacactattacaaatataactttttaagtacctgagcaacaaaaagttgctcaggaatttgccatgtcagatttttcacctatcttagtgttgcaaatcaaaatatgtatcaaacccgacagacatggcaaaggtagcaattaaatccgagaaactcactccttttggaggaatattttcaataatggagcaatttgactccagactctcatctgtaatcgactcaaccctcggtatgagatgcaggctgtatggttatcaatacagcgaaatcatccgttcgcttatgagcgtttatttttgtggcggctcatgcatcgaggatgtcaccactcatctgatgtaccacctttcgcttcatccgacacttcgcacatgcagtgccgacacgattcttagagccataaaggaactgacccaggataacatttcctacacatccgacactggcaagacctacgacttcaacacggcagacaagctgaatacactgctcctcaattgcctattgtccacagggcagctgaaagagggcgaggggtatgacgttgacttcgaccaccagttcatagaggctgagaagtttgatgcgaagcctacatacaagaagttccttggttatcgccctggcgtggcggttattggcaacttgattgtcggcattgagaacagcgacggcaacacaaatgtccgtttccaccagaaggacacgctgaagaggttctttgaaaggtttgaacaaaacaagcttattatcaaccgtttcagagctgattgcggctcgtgttctgaagagatagtggaagagattgctaaacactgcaagaccttctatatccgtgctaaccgatgcagttcgctctacaatgacatctttgccctcagaggttggaagaaagtggaattgggcggcattgagtttgagctggcctccattctcatcgagaaatggaaagggaaggcataccgtcttgtgattcaaagacagaagcggatagacggcgaactcgacctgtgggaaggagaatacacctaccgctgcatccttacaaatgactacgagtcttccgagaaagagattgtcgaattctataacctccgtggagggaaggaacgcatcttcgatgatatgaataacggattcggctggaacaggcttccaaaatcctttatgggagaaaacacggtgtttcttctgcttatggcactcatacgcaacttctataaattcatcatggcgaggcttgacgtgaagaggttcggactcaaagcaacaagccgcatcaagacgtttgtctttaagttcatctctgtgccagccaaatgggtcaggacatcaaggaagtatgtgctgaatatctattcatgcaacaatgcttatgccaatgtgttccagaatgactttggataacaccgacaacttatagtcgtgattttgcgtattgcctcaagtcgcatggtggggtaaggggcatttatatgtctttatggtgacattcgatgcactgtgccccctttttactaacgatgcagattcttttcgcttctgtatcatattaggcgcgtagttgcggatttgaggtataccactatttcttgcacccgtatcgtttgtaaatagaaaatacctaccactcgtactcgacagttgattcaaaacaaccaataatgcgaattaagaattgtatcaagttcataattaaaaaagattcttcggacacagatgaccggaataacgcgaataaccgctttagttcctaatcacaaattgggataatattagttttttccgtaagtttgcagcatgaaacgaagcctacttatacatatatatatagtaatctttttcttctgtttgccttcagcaaatgcccaggtgacacaacagcaaaagactgctgcaacagactccgtacgcgtcagcctactgacttgcgctgcaggaggagagatttattccctattcggacacactgccatacggtacgagaactatacacgtggcattgacgccgtcttcaattacggcatgttcaacttcaacgcccctaacttcatcttccgttttgccttgggagaaacggattatcaacttggagtaaccgattatgagcatttcgccgccgaatacaactatctgggacgcgatgtctggcaacaaacgttaaatctaacagaagaggaaaaagaacgcctgatagcactattgacagagaactaccgccctgaaaaccgagtataccgctacaattttttctacgacaattgtgccacccgcccgcgggaccagatagagcgtgccatcaacggcactctgcaatacgctgacaatatgactgctaacagtacgggaatctctttcagggatttgctgcataaatacagtgaaggccatttgtggtcacgtttcggcatggacctatgcatgggcagcaaagcagacgagcccatcaaccggcggctggcaatgttcgtccccttctacatgcaggagtatttcaataaagcgcagattgtggacaaagaaggacaaacacggccactggttgctaaagaagaaaaaatcgtaataacgggtaaaacaccagccgacttcgtcagcggaggcatcacaccgatgcagtcggcttcgctattactgatacttgtagcaggcatcagcatttacggcatacgaagagggaaaactctctggggcatagacctcatactctttttgattgccggaatggccggatgtatactggcatttttagcactattctcacagcatccggcagtaagtcccaattatatattatttgtattccatccatttcaccttttctgccttccattcatgctatccagggtacgaaaaagggaaataagccgctatatgctggttaattttgcagttttaacactttttatagggctttggacaataattccgcagagaattccgccagcagtattacctttggcactgtgtttgctaatacgttctgcaagcaacctcattctaacatacaaacgaaggtaatgaaaaaaggactgataacttccatactcgcacttacattcagtggtctgcaagcccaaccgctgcctgcctccccaaagctggtggtaacattgaccattgaccaattgcgtacagactatatggaagcattttcatccttatacggagaaaagggatttaagcgcttactgcgtgaaggtaaagtattccgtcaagcagaattccctttttgcggaacggaccgagcctcggccattgccgccatctataccggaacaacaccgtccatgaacggtatcattgcagagcagtggctggatgcaggtacactacgccccataaactgtgtagaagaccccaacttcatgggcaactataccgacgaaagcacttccccctcccaattactgacctctactattgccgacgagctgaaaatagctacccgcaacaaaggtctggcctatgccatcgcgcctttccgtgatgccgccatattgggtgccggacacgcggggaacggtgctttctggcttaataacaataccgggaaatggtgcagtacgacttattataatgaatttccgtggtggctgagccaatacaacgaccggaaatctcctgactaccgtatcaaggatatggtatggacacctgcacttccttttaccaactatacatttctgcccgaatggcgcaacgagccattcaaatacaagctggatggtgaacggacaaacaagttccgccgcttgataaccagccctttcatcaatgaggaagtcaacctgctgaccgaagagctgctgaataagagcactatcggacaagatgacgtgcccgacctattatcgctgacttactacgcaggaaattataaccaccgaagtacgcaggaatgtgccatggaaatgcaagacacctacgtgcgactggaccgtagtatagcttccttattagagctcatagaacgtaaagttgggctccacaacgtacttttctgcatcacctccaccggctatgccgacccggaagctgccgacccgggcgtataccgtataccgggtggtgaattctacctgaaccgctgtgccgccctgctaaacatgtacctcatggcatcctatggcgagggacaatatgtggaagcttattatgaccaacaaatctatctcaaccataaacttattgagaacaagcagctgagcctgactgaaattcaagaaaaatctgccgaatttctggttcagttcagtggcgtgagcgaagtatattcagctcatcgcctgcttttgggcccctggtcaccgcaaatagaacgtatacgcaatagttttcatcgcaagcgctctggcgatttgctcattgaaatactcccgggctggactatcatgcaggaaaatagtactgataaccgtgtagtacgtacggccgatattcctgctcccctcattttattgggaggaggaatgaaggctgaaaccatccgtacccccatcagtattgaccgcattgcccctaccttggcaagtgtaatgcgcatccgcgcccctaatgcaagtacagcatctccccttgacttttgattctaaaataatctgtgcaaatctggataatctgtatagaaatcagtaactttgcacgctcaactaactcagcaataataataaaaacaaatatataatgggatttaatgaatttttaagctcgattttcggcaacaaatccacacgcgacatgaaagaaatacaaccgtgggtggagaaaatcaaagccgcttacccggaagtagccaaactcgacaacgacgccctacgcgccaagacagaagaactgaaagcctacatccacgattcggcagccgaacaacgcgccaaagtggaagaactgaaagccagcgttgaagataccgaactggaaaaacgcgaagacctcttcaaccaaatcgacaaaatcgagaaagagatattggagatttatgaaaaagcgctggacgaagtattacccaccgctttctctattgtaaaggaaacagccaaacgattctctgaaaatgaagaaatagtggttacagctaccgattttgaccgccaactggctgccactaaagactttgtacgcatcgaaggcgataaagccatctaccagaaccattggatagcaggtggtaacgatactgtatggaacatggtacattatgatgtacagctattcggtggtgtggttctacataaaggtaagattgccgaaatggcaaccggtgaaggtaagacattggtagctaccctaccggtattcctcaatgccctgactggtaacggcgtgcacgtggtaacagtgaacgactatctggcaaaacgtgactccgaatggatgggtcctctttacatgttccacggtttgagtgtagattgcatcgacaagcaccagcccaactctgatgcccgtcgcaaagcttatctggcagatatcacgttcggtacaaacaatgaattcggtttcgactacctgcgtgacaacatggctatcagccccaaagacctggtacaacgccaacataattatgccattgtcgatgaggtggactcagtattgattgatgatgcccgtactccgctgattatctccggaccggttcccaaaggcgatgaccaactcttcgaacagctccgcccgcaagtggaacgtctggtagaagctcagaaaaaactggctacccaatacctggccgatgccaagcgcctgattgcatcaaacgataagaaagaccaggaagaaggcttcctcgctttgtaccgcagtcacaagtgcctgcccaagaacaaggcactcatcaagttcctcagcgaacaaggcatcaaggccggtatgctgaagaccgaagaaatctacatggagcagaacaacaagcgcatgcacgaggtgactgacccgctgtacttcgttatcgaagagaaaatgaacagcgtggatttgacggacaagggcgtagacttgattagtagcaatgtagaggaccccactttcttcgtactccccgatatcacagcgcaactctctgccttggaaaacgaaacagagctgacagacgaacagcgccttgaaaagaaggatgccctgatgaccaactatgccatcaaaagcgaacgtgtgcataccatcaaccaactgttgaaggcatacaccatgttcgagaaagatgacgaatatgtggtaattgacggccaagtgaagattgtggatgagcagacgggacgtatcatggaaggacgtcgttattctgacggtttgcaccaagccatcgaagccaaagaaggcgtgaaagtagaagctgccacccagacttttgccaccattacattacagaactatttccgtatgtaccacaaactatccggtatgaccggtacggcagaaacagaagccggcgagttgtgggacatctacaaactggatgtagtggttattccgactaaccgccccattgcccgtaatgacatgaatgaccgcgtttacaagacaaaacgtgaaaaatataaagcagtcatcgaagagatagaaaaaatggtggcagcaggacgccccgtactggtgggtaccacttctgttgaaatctctgaaatgttgagcaaaatgcttaccatgcgtaagattgaacatagtgtattgaatgccaaactgcatcagaaggaagcggatattgtggctactgccggtttgaaatgtgctgtaaccatcgctaccaatatggccggccgtggtaccgacatcaagctgagtccggaagtgaaagctgcaggcggtcttgccatcatcggtacagaacgccacgaatcacgccgtgtggaccgtcagttacgtggtcgtgcaggacgtcaaggcgacccgggttcttctgtattcttcgtatctttggaagatgacctgatgcgtttgttctccagtgaccgcattgccagtgtaatggacaaactgggtttcaaagaaggtgaaatgattgaacacagcatgatttccaaatccattgaacgtgcgcaaaagaaagttgaggaaaacaacttcggcatccgtaagcgtctgttggaatatgacgacgtgatgaacaagcaacgtacagtagtctacaccaaacgccgccacgctttgatgggcgaacgtatcggcatggatatcgtgaacatgatttgggaccgttgtgccaatgccattgaagcgcccgactacgaaaactgcaagatggatgtgctccagacacttgccatggaagtacctttcaccgaagaggaattccgtaatgagaagaaagaaaaactggcagacagaacttttgacgctgccatggaactcttcaaacgcaagacagaacgtatggcacagatagcctatccggtcatcaaacaagtatacgaaacgcagggacacatgtacgaaaacatacttatccccatcacagacggaaaacgtatgtacaacatctcctgcaacctgaagagagcttatgagacagaatgtaaggaggtggtgaagtcattcgagaaatccatcttgctgcacgtcatcgacgaagcatggaaagaaaacctgcgcgagctggacgagctgaaacactccgtgcagaatgcaagttacgagcagaaagacccgctgctgatttacaagctggaatctgtgaacttgtttgatgccatggtgaataagattaataatcagactatctctatcttaatgcgtggacaaatcccggtacaagaggctccggctgaagcccctgaggctccccaggctccccgccaagtagaggtgcgccaggctgctccggaacaacgccaggatatgagcaagtatcgcgaacagaaggttgatttgaatgacccgaaccagcaggccgctgcggcacaagatacacgtgaacaaccaagacgcgaacctatccgtgccgagaagaccgtaggacgcaatgatccttgtccttgcggaagcggtaagaaatacaaaaactgccacggaaggaatgcataaagcaaagctataaaatgataaggcgatagggtgataagatgataccgtcaggtatcttttatcaccctatcactttttctcctgccacattatcacattttttattcgttccagcttttgaatattcagctaaaagagtacttttgctccaaagaacaaaaccaaagactatgaccaaatatcactattgtctgttattgatgggttctctgctgttaggcagctgccagagtgtagaacaactgtccattgattatatgcttccggcagaagtcagtttcccggcaacactgaaacgtgtggctgttgtcaacaacatgccaaacgtaccggacaacaaactcatcatcactgaggaagaacagaaaaaaagcgagaatgaggtggcacgcctcaccaactactacaatggagacgccgcaataacaaccgaatcccttgcagaggcccttgccaacgaaaactactttgaagaggttgtgatatgcgactctgccctccggagtaaagacatcaatccccgcgaaagcacattatcgagagatgaagtactggaacttacacagaatttggacgtagatttcctgatagccctggaaaacatacaaatgcgttccaatcgcaagataagttatatgcccgactggggtgtgttcctcggcacagtggatgtaaaggtatatcctaccgtcagaatatatttacctaaccgcaaaggtcctatggtgaccgtcaacagcaatgacagtattttctgggaagaggcaggaaatggtgaagcgtcagtacgttcccgcctcatcagcgaagaagacatggtgaagcaagcatctgaatttgcaggaacggttccggtaagacatctactcccctattggaaaaccagtaaccgctatctcttcagtggtggttctgtaaatatgcgtgacgcagccgtatatgccaaagaagaaaattggagtaaagcagtagagctctggaagcagacctacgaaacaaaaaaaggaaaacagaaaatgtatgcagcctataacaccgctttgggctacgaaatgcaagacagcatagatactgccttggaatgggcattaaaagcgcaaacccttgcccgtgagaaaagcaagacagacaaaaaagagacaggcgaaatacatgatggaaccatctcctattatatctttatcagcatgtatgtagacgaattggagaaacgaaaagagggaatggcacgcctgaacatgcaaatgaacagatttgatgatgatttttagtcaaatgatgcagagataaccgttttttttatacctttgaacaaccattaagaaaagaaagttattatgaagctcagtcaatcgtcattagcactcttggaggacactcttaaaaaagcaatcggcaaatacacctgcggttgcgaacagactatcgttacagacattcatctgcaaccgaatcagaattcgggcgaactgtctatctttgatgatgaagatgaagagcttgccaatacttccattgaagaatggatgacatacgagggggatgatttctacgaaaatgtagagcgtatcttgtcctcactgctctgcaacatgaaaaatgaaggaaagttcgacaagctgactatcctgaaaccattctcttttgtactggtggatgatgataaagaaacaatagcagaactgttgctgatggatgatgatactctattggtcaatgaagagctactgaaaggattggatgaggaactggattcttttctgaaagagctgctggaaaaataatattccaaacaatcagcctataaggaaaagagaccttcttataataaattagcccctgcgatataaaacgaccgcaggggctaattcttttttacctatacaatacctaacgtatcttaattccatagaaagaacttgaggtggtaacaaaaagcatatccttctgccttccaccaattgccaaggaaatcgggcgttcttctatctgaatacgtctctgctctttaccatatttgtcatagacaaatatttcaccatcagcaacatagacatttccgtcagcatcggtcacattactgtattggccataaggacatattattccttgttctgtcaaacggccatccccaccaacggaaagttgtactgtcgttttattcatctcatttacaatataaaccggttctgactgaccgggaactgtaacagtcaaagcacaagaacgtcccaaatcataggtatccggaataattgtcacgccatccggagcgacaaaactatactcaggcatactggcaaccaccttgtcaaagtcacctctccaacgactggaagggtgaatgactttctgtatattcttcatactggctgtaacgacacgcggcataggcttcatcgtagcatccacgttatccggattaaaagaatacccccaagcactccagccactgttaccccaaccactgtacatcggattatcatccggcaagcgcactaccgtttcctgcttgccgttcaccagataacccggctgagggtcatagcggaaaataaccagcagattgtcttgcgtatcagtagccaatgtaaaaggcttccagggataatcggctatcaaagtaatctgctccgtgtctgccgaccatctatagattttcttcagacggttttcacagaagtagatatttcctttactgtcggtagtagctccggaggccagttcaaaaccggtagccagcttcacaggcttgtccatgaccgtgcaggaagggcgaaggctcttctcgctacccgaaacagtgagacgggcaaagtcccacgaataaacgggcaacttcttattcatatcatatataggaaactctatgactggtaatatctgcgtataattgtgcatattacggaaagtgatattcttgcaatcccatatgcggaaacctatcctcttcggcataaaggcacggattacgcgatacatccacacatttaccatttcgatattttgacagttggacatttctgccatataacaatcaggcccttcacgaccttcttcctcaaactggaaagcataaattttccagttggccacattatggaaacgggcttcagtacggacatgatgctccaaagacatggcataaatacgtcccggagtcttcgtttcgctaatataaagcccactggcagcatacgtactggctgtccaaacatccttaattgtcccaccgccattgtttgtaatccacaaactccaatactggttgtcccaagccatatccttaccggtctccatgaccggagaagacggggaactaattcgacgctcgcccctgcggtaagacgactgtccggaaacattcggagccggtttgcgcaaggtgccgtgcccgcctacaaacttcacatcattcaagtacgaacgctcacccgccatccatttacagccgacagcacggtaattatacgcaccggtattaatacctataccattcagcatgtcgtcgccgccttcggaagattcaaccaaaggcacaggcacgccgaaaccactgaatgcaggctcgctttccttcaacagaaattgagtcccaaaaggatgcagcccaatcagcttagtaccgggagacagcttcaacgttctcgtcagacgataccacccctggggcacatagatgtttttatgcaaagagacagctttctcaaaaacttccgtatcatcagtctcgccatcaccttttgcccctaagtcgcggatattgacccatgtctccattgccggaagaaccggaaggtccttgccaagtgtaaccggctgttttgccaccggctctatttcacatatttccctgaaagaagaagcatcattcaaatcctgatacaccagaccgtaagtaaactccttgactctgtacatttttgcttttccggcaactttctttccactttgagcatagtccaccagtacgggaacattcctacaatccacattcaccagattcaattgcgaaaaagtatttccctccacgcttaccctgacaccggcttccgaaatattctcccacaacgaattctccacatgaaggcggtctgccagattctctgccatttcaaaggcaacgggcgtattcttcacatgcatattgacgatggcaaaccccacctcttttgaatagacagccgcctttctctgcccctcaaagtaagtatcgaccatcatcataggccatcccggagaagtcctggaggaaattatcccatattcaccgccataaaacctgacgtcttccagttcattgccaacatcatacatgccggcttttcccgaaccaatccgaatgtcgcaatgattgataaatccatgctgggcaaaatgcgcacgaatggcgacggcttgaggattacctttgtctatacggaaatccacattggacaccgcactatagaaagtacctgcaccagcatccgaaggcttcctgccctcttgtgccagccctcccgtaaaccatatcatataattttgagtagtctggaaaccgggtgtatcggctcccaaataaatcaccggccgtttcttcccataaccaatcagccgaatggatgagggaatttgaatcgtcttgctaatgcgataatttccttccggcagaaacagtatcccaaaattcttttcgcgcttcacctgattgattgcctcttgaagcgcatcggtcacgtcggactttccatcagccttgaagccgtaattctccggggtaaagtagaatgcttccggatcgtccggtctttgcgtataggcggaaccaccccctactgcccacccggacgacatattacagataatccaacagactatcagcaggtatctcattatttgataatttctcattacacagattgttttaatatggattttccttatttaatacgtacaccaaagaacttggaacggcctgtgacaaacaatgtattgccatccttaccgccaaactgtaatgtggacggacgttcgggaacacgaatcatccctttcttcttgccatccttatcaaatacatatatttctccgtcagccacatacaagttcccttccttatctacagcagaaccaaattcgccctgctccacaaaatagctcaagttggagagcgtaccgtcattggccacatccatcttcaccattctgcggtcatattcatcagatgtatagaaaggctttcccggataggcttccagcagggaagaactacgtgacaagtcgaaataatgaggaatgatagtttttccatccggtgccaggaagcacatttcaggaacatagaccgacaccgcattgaaatcgtggaagtctctccaacggttagaaggataaagagccttatacacgttcttcacttgacccatcggaacacgcggcaacagtttgatggtctcttccggattttccgggtcaatggagtagactctcattgtatatgcggaattaccatatccgctgaaagaagtaccttttgtatcaggcattaccggcatttcctccggcttaccattaatcagatatcccggctgcgcatcatatctgaacaataccaatagattatcttctgaatcaaaagccaggttggagggtttccacgggaaatctgccagcagcgacaagctgtttgtctctaccgaccacttaaagatacgacgcatccgatggtcgcagaagtaaatgttacctttactgtcgcgcgcaatgccttcggcaaattccaaatcagaagccaattggttcaccttacctatttcattgcctaacggttgctgatgaggttcttttccggttacaatcaagcgagaaagttcccacgggcggatgtcaatgtctttgttgacatcgaacactgcaatgttattcgtatatttaatctgagaatagttatgcaggttcagaaatgcgatgttctcgcaattgcggatacgtacagaactgtgatacggttcattgacacggataacgcggaacatatacaagtttgcaaaggtcacatctttgcagtcgtccatctctatcggttggcaatcggtactttcgcggctctcttcctcggtttgcatgcaatacaccttccagttggacaccttgttgaaacgtacttcatttcttacatgatgctcgatggacatggcatagatacgccccggagtagaagtattgttggcatagaaaccattggtggcataggtacttgctgtccagatgtctttaaaggtgccgccaccgttgttagtcacccacagactccaatactggttgtcccaagcaaggtccatgcccgaagccgctaccggattatcgggagaactgatacgagccggtctgttccaccggccacgtggttcctcaacacccggtttaggtttccataaaccaccatgcccgcctacaaacttcacgtcattcatataagaatctgcatttgccatccacttcacacctacagcacgatagttataaccgccggtattgataccaatgcccaccagcatatttgcaccgccttccgaagattccaccatcgctttcggaccgccaaaaccactgaatgcagcagtactttcgtccagccggaactgagtgccaaaaggatgcaggcctatcaacttggtatcgggcttcatcttcaaagtttcggtaatgcgataccagccctggggcacatagatattatcgtacttgtcaatagcctcctggatggccttcgtatcatccgtttccccatctccctttgcaccgaattcgcgcagatttacccatgttgccattgcaggcagtgcagggatgtccatcagttgggcaaccggcatcttctgtatcggttcaatatcaaccaacgtttcatattccggcatatccaccatgttatccatctgcaagccgtggtcgtatgactttaccttatagattttatgagcaacatgggtggccgtattgctacgggtatatttcgccaaggtcggtacattcttacaatatacattgcgaaaggttatctgattgttgctgttgttctcgttggtaatcaccactgccggaccacttacattttcaaaatagctgttttccaaaaataacttgtcgcaataattagggtcaatatcaaatacagccggaacattcttggcatacagattcaccattgccaaaccggactcctgacaacgaagagcagctacacgttgtccctcaaaataagagtcgaccatcattaccggccatccgggagaagcttttgtcgtataaatgccataatctcccccgtaaaaagcaacgttttccaactcattgcccacatcgaacagaccagccttgcctttacctatgtatacggccacataactgataaaactgtgttgggcaaagtgtgtgcgtagcgccactgcatgcggattaccatcttctatgcgcaagttgatattcgacatggcactgtagaacgtactggcaccggcatcacggggtttctcaccttccttgacaacggctcccgtaaaccagaacatgtatttagcttttcctttatcatcagctacttcctcctgaaaacccggagaattcttagccagaataaattccgggcgattctttccatagccaatcaaacgaatagccgtaggaatataaatggtcttgctgattttatatttaccttcagggataaaaaggattccgaaattcttttctttcttcacttgattaatcgctgcctgcaaagcatccgatacatccatctttccatccgcctttataggatagttctcgggagtgaaataaaaagcttcggagtcattgggttttagaggatatatcgaattcaattgtacagcatacaactgagtacatatcatccccagcaaaattaaaataatcgtgttcaatttcttcatggtcttatttttaatgtatggataaaaaaagacgttctgccgtcaagcagaacgtctccctctgctataaattacaattttataactactaccggcgcataattatgccgtacagtgcccacacccgaaacatcagccagagcgccaatacggaaataataattcttgctgtatttcaagacatcagcattttgtcccagatcgatggacaatgtataaatatcagcgctatttatagcagtactcggactaaacacttgcttatcagtccctccattcaacgtcaatttcacattgttacctacccacatatctgaaaaagcaaacagctgaatctctttcaatttcacttcttgtttaccagcttccaacgagaatgtagcagtaattacattgccattcttttctacttttggacttttgacgcgaatataaggaataaccttgaaatcatacacattatcccctgacttaacaacaaaatccttcacttcaaatggataaaaattcccattttcaaaacggacatcataagtggcagcaaaaaccatattgttacgatattctccggtatttgtgatataccaggtttgatccgtagcattagtaaatccatgctccctcactttaattgcattaccgttttccatatcagaacctacaagttcaccagtctgttcgtcaaggatagaaccatgtatggaagcatccggtccctcataattatcaatttcacaagatgtcaatgcgaataagaagcatgacacaaataacaatatctttttcataactttctacttaatattattcaaattaatgacctggattctgaactaaaccattcgtggcaatattaggtatgcccctatagtagttgatgttctggaaagtacgccctcctcttgtttcgtcaccaaagtagttcacccttgcaaagacatatttaggctctgcaccacgcaagtcaagcatcggcaccaaagctttacgaattctattattgctgaactcagtatggaattccctacgacgattcatatcccaaaaacgctttccttcaaacgccatctccacacgacgttccttcaggacattctccaatgtcaaagatatccggtcggtgtgtccggctctacgtcgcaaagcattcaaatagttctcagccaattccttatcgcccaatccactaccattttccacaacagcctcagcataattcaggtagacttctgccaaacgcatatcaatataagaggtagtggacgaaagacggtcgggagacatgctctcgccctcgggcatatacttacggactccaaaacctgtagcagtccaattggcatcctcaccactgttcacattattaaatccggagaacatggtttcaccttcggctcctaaagcataatatgttgttccatttttctgagtagactcgtttgaataagccacatagctattattgtccttgataaatccgccctggataataatctcagtgccggcataagatgaacccggcacaaccacacttgccaacagacgtgcatccttgttggcaaacggttcatacaaatcgttgtatttaacaaaaggtaccgacatcaaggtgttcactacagaagcattattcatattatggaaattagcgatataagcatcttcattcccatccgtacgagttacaatctttgcactttttcccgtgccgtcatccgtataatcttcaaacaaatcaacgatttccaacatcggattgaaacgtccatatttcagagcgcccggattgacttgaggaaggatattaaactgagcatagctatgtccctgattagtattggttgttccattaagatacgctttactgaaaataatctcttcattctggtcattcaggaacaaggcctggaagtttgatgcagcctccttaacagtagccggagcaggcttataaagagatttaccggaattctctataaggaacttagatgcttcaatacattctttatagaatgcatcggcatcggcagaagtcattccacccaccagtttctgagtgacagcctcaccagccaaaggtgccagattccaatacttggctacagaagctgcatgaagtgcaactcttgacttcaacgcataagctgcccacttggttacgcgatacaaatccgaaccagaagtcgcatcgggcaaagtagcagcagcaagggtacactcattcaatacaaatttccaagtatccaactctgtactgcgaggaactgccacagcacccggtccaccattggcataatcatcgtcctgcactttgtcaatcagaggaacgccgccatatctttttacaagcccataatacatataagcacgtgcaaaatgggcttcaccagtcatacgatccgcatctgcaacagaaattgttccggcttctttggctttctctacattctgcataaaaatattcacctgacgaatatctccatagggccaataattgaatccttcgtaacctatacccactcctccgtcactacgggtagcttcgtcggtgagaaatgccaaattagtagtttcattcacaccatcataaccgcgttgattaaaaccagcgttcggacgataattaaaatcttccataggaatcatggtatatatgtttgccaatagtgcctttacaccaccttctgtctccaataactgctcgggagacactttatccagcggttcaagttccaagaaggcattacaaccggacaatcccatcaatgcacataatgagaatatcgataaaatattttttttcatggtatttcagaattaaaagtttatgtttaattctggaagacttttgttatcgccttatacaaagggttttaggagaattacccgtttttgaggtaatgatttggcaaccgtgctatttgctgtgttatgctatgaattgcgttcaagataacttgttttaagtacaaaggtactattttatctgtaaaagtgaaacatatttttgtgcgaaaatggaagttgtaaaaccaacttgtctttatatgattttatcaacttgacatttgatattttacatccttacacagacttttccatccatctctgttacctcattacttttaatcatttgcttatacacattacggagtgaataaattatgttatccccagtacgcttaaacccaaattctctagcagttacaatgaacaaatcttcaggagtaataccaaagctatgctgagcaatcgttttcatagctaacgctaattcttcatcacaaatgtatgtgatagggcgtaaataatcatcatcgggattaggaatacgaacctttatatctgtaaaatcctttattctgacaaactcatttttatcctcggtaatcattccatttaagtgattactgaaaatgtatcttacttcattacgaacaacagatgttgccttctggcgaccatatacaggtgcgatacgcctacataattcttcaaaatgtataggttgttctaatgaaataatatcccaagctatatcatatccctctttggtttttccactttcatcaattatgtttataggatatgcacgcttatacaattcaaatccatacccaatagttccaacctcggcaggtttaaccttttcttctatctcaatgatagggggtgtagtatcattattgacaacgtcaataaaataattgtcttcaggctctatcgctacacgtcctatagccttctctactgcattgataagtttatcttcttctgtcttttggtcttttatccaatctgttgaccaaatacgataaatagtccatcccatatcttcaagtacggtttgacgcaacctgtctcgttcgcgggcagtacgagaactatgatatgtcgctccatcacactcaataccaatagcaaattttccactttcagtaggatgtttaaccgccatatcaatacggaatccagaacaaccaacttgtgttaccacattgtaaccattcgattgcaagaaatcatagacagcctcttcaaaaggcgagtcaaattctaaatcacaattaaatgtaagttctttttctaatgctacaattccttgttgagcaaactcaatatatgagtgaagcatctttactccttctgaagaaaccttatctaaatcaatatcagtcggcacaatagacccaaccagttttatattgtatttagcacgtgtaatcgctacattaaggcgacgatagccaccctcacgacttaatggaccaaaattcatgtacattatgcccttactatcctttgcgtaaccaatgctaaagataatggtgtctcgctcatcaccttgtacattctcaagatttttaataaagaaaggttcttccttatcctcaataaagaatttatcaaaactgggattttgtagccgtttttgacgaatagctgcatctactgcattttgttgcgactcactaaatgtaacaattccaagtgaacgcttaggatgcttcttaaaatgctcaaaaactaaatcagcgacccttcttgcttcgataacattattcttttttcctcctctatcatatataccatcttttacatatacatactcaacaccgcaatcaggagctttttctgttgaagatggaaaagtaatcagttggctattgtagattttaatgttggaaaatgctattaaatgttcatgacgacttctgtagtgccatcttagactacgttctggcaaaatagccacagcttcatccaaaatagactcatatgccccagcatcgttatcttcaatagcttcatctgtatcaatatcaaaatcttcatcattaagagaagtggagaagaaacttgttggtggcaactgcttagtatctcccactattacaacctgcttaccacgcataattgcaccaatagcatcttctgtatgcacttgtgaagcctcatcaaagataaccaaatcgaaatcataactctgtgcttcaaggaatacactgacagacaatggagacatcataaagcaaggacgaagtgatgttacaagattgggtatagtcataaagagtttacgcaatggcatcaaccgtcgctgcttattaagttctcgtttcaatattgcaatttcgtctcttgctccatttaccgagttaaaatcaggtattctactcaatgcacgctctctcactcttgcctgtgcaatcttgaattgtcccttgtcgagttcgcaaaattcatttatggtttgtgtttgtattctacctctaaagttttgtaccgcagggaaatttggcaatactgcatctaaccataaacgatagaagcgctttagataggcctctacgatatagttagaatccatctttaattcttcggctttattgatatattcttcgagtcctacatttttgcacttctctctattagagcaataatctacccactcttccaacaaatattttttatccttacataaggacatacgattggctaaatcaagaatattatgctgataaaagtcttttccattattgaagagagagacaaaccatgttatacttttttgcaaagcatccttttgctcagacattattagattctcattataacaataagttctgatgccgcaatcctcacatatattctttatgaaagattcggggagattgtataaagaaacgagatttttaaggtcaacagtatatttaagagcttctattagtttttcccagtctgtttccgttccatcataataatctttatacatatgacatatggaatccttttgttttgccaacccctcatttaagacattaagagatataagcaaatccaaatcagaaatagcagatccataattgcaatttactttttgcatattcattaagctctgatactctgagataaactccatcgcaatagagttagtttcctgtgcatatattctaatatcattccactgactcgccttattataatcacactttagcagagcgcataatctttcaaaagcagactctatattaaattctgaataatgggtcttaaattgtataatttcagagacaggtaattgtccttgaacaatcaaattcttcaagtctgaagttatcatatgcaaatgacacactgactcttcaaacttttcaatgtcatcagacaatacatcccattgagtatttatgcaggcataataattgccataatcatcataatattgcgatgtgtttgtagtaatagctccctgattatctgaatattgtttaagtatattcaatacctcaagggctttattgtatgatattttctcaccctttgacaaatataaattgagctgtttaatatctttatggtatctgccattaaagattctgaaaaaagatttatattcacctctgaatcgttgcaaaacaggataaaaatcccattctaaaatttctttgtcaaaatgtgatagaatagaatctcttgattctaataccgcattatgtaaagacttacaaacctcaatacttgatttaatacgagttaattcttcgttgttaaaccacttttgagttggttgtatattgtgaatatcagctaatgcttgaatactcttgataaaacagatgacttgatcaattgtgttgagttctgctattccaagtttagaggataagagcttggcttcttctattattgaatttatgccattggtgattgatattaactcatcatttatcttatctatattttgagcaatccgatcattatcgttttcttcgattcttgcttggagtttatgcatgagagaacataaactatttttacgtttggttgcgtcgcaatcaaaaaagatgtcacgatatttgcttcttaattctgtggttattttagctatttgttctacctgtaatttatatttatgtgcattctctattaaagaatcagtattatgattcataatccattctattggaatagtcggagattttgcaacaaaagataaaaggaatataagattgtcgataccaattaaagatgattcaaatctaacacctaatttggagcaaacagaggagtgtcgttccgcaagttctttcattaggggaatagctgtagctacatttgagtcaatctcatgccttaatgcattggataagaatttgacagaggagtcacgccatacattatccgtataatcttcgcttcgctttcctatggtcttagacaattcgcttagtaaatatctcctttcattaagtactgctaccgttactgtatcgacatttgatatggagaaaacaacatctggtacattttctaattttgccaactccccattaacagagtatatagaaacattaagtccagaagtttgtgtatgcagttcctcttgatactcattgagtaaacatcttttcctctctaagagatcgagttgagtcaatgcctcatctctaacacgagtacggtcaatattaatagagttggcaagatcacgcaatatatccttcttcttggctttgtggctatgaagcgtaaagcagaaatccgccaatccgacacttgctaaacggttgtaaaccacttgtaaggctgccatcttttcagatacaaatagaacttttttaccatcagctatagcttcagcaataatgtttgtaatagtctgactcttacctgttcccggaggaccttgtaaaacaaaacttgcacctttctttgaaagtagcactgcatcctgttggcttgaatctgcatctacaacttggaatgtgtcaattgggcgaatttgtttgtcgtgatcgaaattattcaaatcttctgacacttgaattggactttgttctccaacaagtgctgcaattacagaatttgcatttagcttttcctcattcctttccaaatctttatacatattgattttaaggaatgagagattggttagatgtgtactttcttctatattccatcccttatttttaattttacaggatagtttttctaaatagtctgtaggagagtcgtgtgtcgaatcaaactctggcatcgaaataccaaaatcgttatctaatttatgagataatgttggatttacaacgatttcatcgtcatgtaataccaagcgatatggagaggttatagattctatgagaagccttacgggtactaaaattacaggtgaagaaaatacttgtgatgaatcatctcgttctttccatttaagcatacctaaagtaaggtacaaggtatttataccttgttcttcgattgaagtattagctttatatcgtaaggatttcaatgtcttttgaaggtcatcaataggtttatttgtttcaatatcacctttaattatggtttcatatatttcttcaccatcatcatcaacttgtactttttgggcatacgggaatacgatttctcgttcattaacgacaatgaactcccacaatttatcaagagatggcgtagtaatcattacgttactacgttttccttcaagaaagtttattaacctatttctcttgccaaaatcgagcaataatttcttccaaatttctatacggttgtgtagcttctgccccataacacaaaacctttatatatgacctttaatatttctattatgacactctcaaatgttagtagtaaaaaagcgtgaaccgcaatgccacttctaatttggaggtcgtaggaaaccttgcatacagatgtagtaatagcagcccacgctatagcgtgagaaccactatgccatctgagtatgcaatttgaaaatttcctacgtttccaaacacttgatgtgcataacgcttcttctttttctatgttttggaaagagttgcctcaatccaaatgcaaaagtacaaaaaatccgtgatatgtcatttaacactcacggactttattttgatttacagttgcatacttctgttttgcctcggcttcggtattccgattgcttccctaaactcattcatcttctttctgaaccagctgacgtgtgatactccgtcaatcttgaaatcgaactttccattttcatcctccttgatggagcagacagaacgcttggcttcaaaactttggctgaactccgaagaatagagttttcctgttatgaaaacatccttgaatgcgcataactttcggattatatcgtctttgaagcccaagcgttcacgcaggaaatttattgtcggcatcagtttctccacataagggaagtagcgtttgacaaaatcggtgaactcagacatctttcggtgtcgcttttcgtaggcatccgttatttcctctatgcgctttgtgtgttgctgctccctttctcgggcttcctcttcaagctccgatacacgttcctgcaaattcctgttctccctctccaatgtctttaccttgttactcccgaaaagagaaccgacactttcggcaatgttggtcgctgcggtcgtggctgcgcctttcagtttctcggtctgtacctctttcttggcttggcggagttcttcttttgccgcctcttttctctcctgcaaatccaccacttccgctttgaggctgtctgcgagtttcttcgtctcgttgtaatactgctgcgtggacttgtgccgtgccgttgaaccgtctatgccacgctgcaatccgtactttgccatcgcaatggcgtatgtgtcttggtaggacttcaatttcagccgtgtcataatatcatcggcacacaatcgggctacgtcggtcggtttcttgcgatagcgtttcttcgcctgttcctcccgcttcctgcgcttgcgctcccccttgacaatgggaacaagcgttatatgtatatgtggcgtttcctcgtcccgatgaagatgagcagccacaatgttctccttgccgaacaggtcggcaaagtatctcatgttgtcggcacaccactcatccaatcttccctcactttcgatgcgttccatgtcctcgtgcgttcccgacacgttgatgcggattgccctcacttggttgctgccgattttgcgtgtcagtccggcttcctccaatctccgctggatggctgccgaacggtctttcactccatcggggtagtcgattagtttgcggtttagatgtgtccgtgtagggtcggcgttcttcggaatgatgaaacgctcgatgtgggcggtcgttccgctgtcggaaccgtgcgccttttccatgtgcaatactacaaatcccatatatggttttcctttctttttaacttgtgaaacaatggttgatgattataattgtatggctctgccgttggcttgggagagtccagagaggtgcaacctctttggcttattggggaattttcagcggtacggagtattgcggctcggaaaattccctaataagctatggtattttccgttggcaaatatccgtgcgcctgcaagcgtccccactcactacatcttcagccctcgttttttcggtggctgcatcatccgccttgcggattggacttgcctctcctgcttcatcggctctgccgattgggacaagggcttaccgcacagatagtcgttcaagtccttatactcactatagtatatagacttgtcgaacaggcgttccccgaaccttgcttttagatgctcacaggctgtccgtcctgccgtgtcattgtcaaggaaacagccgattcgggtgtagtttgccaatacgcccaccgcctttgcgagattggaaacggagttcagtatgacatagtcctgcgtagtcagtcgggggcattgcggattgttcctcactcggatggtaaggaacgagaggtaatccatgaagccctcgaaaagataacacatacttcgtggctctccctgttgtcggatatgtgtgatgtctttcggggcaaagcatcccttgaaatagcggttgcgcacctcatagccccctgtcatgttcgggaagccgatggcgaaatagggtttgcccttgttctcaaaacggagttccctgcatacccttttggcgagttcggtatttatcccacgctcctgcaaataggacagcaacgcaggagaggacagttccgtaacttgcaggtgtcggtacatcgtttctgaaacggattgccgacccaaagaggacggtgtatgattaacggtgtgcaagtgcggtgtctgtttggcgatgcactccaacagatacggtacattgtcggaacggtagagttccgaagccaaggcgatgatgttgccgcccttgccgatgccgaagtcgtaccattggttgagttcggtgttcaccttgaacgaggcttcggtttcctctctcagcggtgacttgtaccaaagactgttgccctgtttcttgacgggtgtgtagtccaaagtttgcagatagtctgctattctgatttgttttgcttcctgtgtagtcatatcattatggttttaatgttgatgaaaatccgttgatttgatgaatagatagtttaattcatttatatacagacttatatatgctcaacaacttctcaacaaagcactcgccaaaagaaaaatcaacaatcggtcagtgcattgttctcaacttctcttttggtctgttgagattttgttgagagagtatattccttattatcaatacggttatatccttattcatcaattcaacaaaaaacaatgggattacagggattcaagttgctcccttgtgatggtgtagaagcgtccgaccctccttatcggctcgtaccgacattcccgattataattcagttgataggtggtatatgtcagtccgttctgtgcaggtatcagtttccagcactcctgcaacactttccgcacttggtgcttctccgccttgacctgtgtgttcgtcagcaataccaacaggtcattcgggcaaaaagagaaagtgtccgtgcctacactctccatgatgtcaagtataagctcgtgcatctctatctccagtctgttgcggttgctgcggataatcttctgcaaggcttcggtatgcagcagcgatggggcgaaccacatacggctttccttttcggtgtacaggcttctgtgttgcaggaaatggagaaaagcgggtatctccgctttcagcttttgcaggaaatcggtatcatccgactgcaagcggtctatcttgcgtacccaatagcgtgtttctcccgcatctatgatgacgggcaggtactcgttgttggaacacagcacgaacttggcgaagaaggctatctcgtcacggtccttgcctttggcttccactttgtaggatagtgccgtgcttaggtttttcaacctctcgctgtcctccctgcggctcagcagcacctcgtctaccacgataaggagtttccctgcccagtcggaattgaactggctgcggaaatcctcgttggtgttgaatgtcacgttgttctgaaacagggctttcagaaaattgaggaatgtgcttttgcctgtgttgcgttcctccgacaccaacagcaggatgggcaacttctgtatagggtacaaatacaatagttgcagataatccatccccaactcgtattgctctccgaagatgtgttccaccaatgagcggatagagggaaaatctccctcttgcggttggtggtctatcggctcgtagagattgaggaacttgccgattacaggctgataattgacgtgttcgggtacggtgcagaaaccgtcatacttgggtacgcagccgatgtaatccttgccgtagtcttggcgcagggtctcgttgttccatgcgatgcgtttccttatataccctccgttcagtttcggctgctccacaatcttgtagagcgttgtgccgacacggatgaattcttcctttgccatgccgctatccgtgggcggtcgatggctgttttgttgtttttcagttgccataaattcattgattttagtttgaacaatgccaatcacaaaagtataatcaattatcggataggatgatacgcaaatcacagcagaatggggaataaaacacctcaccaaagaaaaatcaatgaatggaagcctaaaaaacaaaaaatcccgaagaaacaggactgaaaacaggtgcttcttcgggtgcgtgagtatgtgtgaatggcaatacgcctatgcaaagtatttcgggcttgccgtatcggtaatgttcagcgaaaagaagatgtttgttttctcttttcgcaagtgcagtctttcaaggatggctctgcgaacctgctccgctccgaatgtattgatgcggaaagcaagggcgattatggcttcaagattgtaaacttctatgttgaagttatccgacaggcggatgatatgctttatctcgtattccctcaaaactccgcttttacagagtgcctttatccctgcacggactgtcggggcgataaccccgaacaattcgcaaagttcccactcggtcatggcaacagagcctgtatcggtcggcagggcgatgttgccctgtccgtccatagtaatgatgttcctttccatagccttaccccattgatatgttattgaatgactgactgagtttgttaccgaatttggtaaggtcatcatctatcttctgtatggtaatctttgcgtagagctgggtcgtgacgatatttgtatgccccaatacacggcttacgctttcgataggcatacccttgctcaaagccagcgttgcgaatccatgcctactgcaatgaaatgatattgatttggttatgccgcattcccttatcatctttttcagtggtttgcacacagaccaatagttgaggttgggaaacacaagattgttttcctgctgcggtctgtaacgctcgataatctgcaacggaatatccaacagcttcacttggaacggtactttggtcttgtgccgctttgatattatccatttctcaccgttcacctccacaatatcgtcataggtcagttcctgaatatccacaaacgaaagtgcggtgaaactggcaaagacaaaaatgtcacggatgtatgcaagtttgctgtctgcgaactcgtgtgtcatcaccgctttcagttcatcctccgtcagatactcacgttcctttacattcgggctgatatggaactgtgcgaaagggttgcgtggtatcagtccgttgtaatgcgctttcatgaccacacctttcagccacatacagtttgaccatatcgaaccgttctgcaatcctgcttccgttgagaggtatgcggcaaactccttgatgaagtctggtgtaagttccaacatggacatatcgctgcgcctgtagaacgacttgataaaggcggctacatggtttctcgcccgtacccttgcccgataggtagccagcaccctgtctttgcccacacgtttcttgaacgtctcattttccttgtcaaacgctttcagcaacgtttcatactcgctgccgatgccttgataggcgtttcgcaccatttccgctgtaacgtatgcctcacggtctgaaatgcgttggtagtgcttgataatttgtgctttgatgttgtccaaagcgtggttgatgtttcgggcttctacgctcttgcctttggctcggttacctttcgcatcccaaagcgttttcgggatggtctgcttgcaactgaactgcgccacagtcccgttgattgtcactcgtcccatgatggggacaatgccgtctctctccttgctgccgttcacgtagaacagcactttgaatgtacttcttgccatactcgttttttgtttgcaaagttaaatatcaacgagttagaccttgatacgcaaatcggtgacaaacggtgaaatagcatccactatgtgttaaatctcacttctaatcgggtaatgatttgcaaaccgttctcctgctatattctgcttttctttactttttcagcattttcggtttgtcatcatctgacaccgtaacggcattgatattaagccatttagcgtcatttctcccgtttttcgaggttattccagagattattcgtaacccaaagttataagttctcatcaacggatatgccaggttggctccccaatccctttcctcacgttcggggtcagcatccttcaaagccttgttacagaacgtaagcaggtttgaaccattgacaaagatacgggcactgttcaacccgattcttttcataaatgattttggcagattgtaaccgatctccatactcttcaaacggagataagtagcttgcggaagccaaacggaaataccataattccatctgctaccattatccgaagtattggagaaattgtggcgtaatgccggataataaccggctacccattgtgtggcaggattatacggatcatctgttatatttgcaggatgccaacgatctacatacttcgcaattaaataagatttatttgtcttgccaccatatccccaaacatcatcattggcatatccgatggagtaaccggaagctccttgaaacagcatattgagatcaaagttcttataagaagccgccaaagtcaacccatactggataggaggatttgcaccggttgcccaaaactccggaacacggtcactgctgttaatcctgccatcaccattcaggtcaagcaatctgtaactacccggaagcatcttagagttacccaagtttccaccaatcaaaggagccgtttcatactgttccaaagaagtatattggccatcgtatttatacaaccacatcacattactgttacggttttcctttccattcagccatctatccatagaactggtatattctgcatgttccacatgcagacttctttcacgggcatacgtaaaattagcacttactgaatatgagaagtccttaccgatttgtcctctgtgtcccaattcaatctcaaaaccccggttccggttagaattcagattttccttcgggaaacttgcaccaaatgtatcaggagcagattgtgcacggtcggccaaaatgccttcattcttacgattgaaccactcgatagtaccactcaacttaccgttccataagtcaaaatccagacctacattggaaatagaagatgtaacccaagaaagccggtcagtcactacaccaggagctaccatacccataatctggctggcaccatcaaaaacataaccattagaagctgaattataagcagatacatattggaaaggatcaccggcatcatatccactttgcccaaaagaacccctgattttcaaattagtaataaacggcaaattgtccttgatgaaactttcttccgaaagccgccatccggcacttaccgacgggaagaacgtccaacgcttagaaggagcataacgataagaaccatcataacgtcctactacctccaacaagtatttaccggcataatcatagttcgcacgcatcagataggctgccaaacggccaaaactacgataccctgaattggtagctgtacccggacttgcctgattcaaaatatcattagtaaacaactctgaatattgccgggaaccggataattcatcgcgtcgtgtactgctcaactctgccacagctgtcacattcaaattgtgctgattgaaagaacgcatatattgagcctgcaccctaccataaatcttctgatatattctcatcgtattggaataagcgtcagtactacctcccgtaccggcaggcgcatctgtataataatcatacaacggataagaacggtttaaagaagagttgttacgattgttaccgtcaaatgaccccaaaagactcaatgacatcccttttacaaaaggaacttgccaattcaattccacatcggcagaatacgtcaggcctctgttcttgcgataaccgtctatatccggatcaaccaacgcaaaaggattcttgttttcaggaccgattgcagacaaatgattgggattgtcaatcgtatgagtaccgataccacggtcattaaccatcaaagtcttaaaagtccacataaaatcctctctcggcctttgggtttcatcccaacgtccggacagattcacattcagtttcagccctttcgtaagctctgcagtcaggttacttctcagattatatctatgatagtattggataccactcttcagcaaaccattatcgccattatagccgaagctcacataatacttcaccttatccgttccgcctctcacagaaacagtatgcgattgctggaacgccagtttattcataaacatgtcaatccagttattgtctgtataacccttagccccggttctatacagttccagaatatcgtcagtgtattcaggggcagcctggtcattacgtgccctttcattggccaacatgcgataagcataagcatctaccgtttcttccatacccgtggcattcttcataccgaacaatgccgagtaagatactctggtcttttcggccacaccttttttggtagtaacaatgattacgccattagccgcattcataccataaatagcggcagaagcatctttcaaaatagagatactttctatatcctcagaattcagctgtgcaagttcttcggtaccttcacgtgtgataccgtcaattaccaccaacgggtcaccataaccgcgaatgctcaccatattgtcgaaagttcccggctctccggttttctgacgaatcaataaccccggcatcttaccttgaatattgctaatcagattctcggtcttggtcgtagctatttcatcagcaccaatggctgcaatggcaccggtcagtgattctttcttctgtacaccatatcctacaacaaccacttcatccaatatctcagcatcttctaccaaaactatcttgaacgaatttcggcctgcaacctttatgttttgcgtcttataacctacatagcttattataagagtagcatcagagcccacattggtcagaatgaaattaccgtcaatgtctgttatgacaccgttggtagttccctgcaccaagatactggcaccgatcaccggttcaccggttgcatcgaccacagaacctttcaccgtcgcagcctgcaaagccatctgtaccccatcagctcctacagctttatcataaaggattatattacggtccaataccttatagcctatattggttcctttgaacacatcgttcagaaccttgaatatggttttgttatttgcccggaccgatacacggcgcttaacgtcaatctgcttgttgttgtagaagaaaacaaattcggtaccttgttccagctccgtcagtacttcatcaacagtcttgttctcaagagtaatgtttaccattgtcttttgagcataaccttcattggcaaaagtcataccaaccaaacaaaacaacataaataatgcgcatctcatagcaagaggaatttttttcatgcatctcatcaggacactttttgccctaaatgattggatacaatagtgttttttcataattttgtattgatttctagtgaaaaaataaagttactttatctgtcgccaaacagatatttaaaagttactgtgtttcatgcaggaaaatgcgccaacattttcctgcatgtttttctaaacggacttgtgtttcatcatactactttttaaagggttaataaacttctattacctgtctctcggcattcacatcaccatcttcaacaaacttgaaatgaatattcgaggatattcggaagtgctccaatattcgctccaaacgttgtttggtaaatgtagccgtaaaggaattctgcttcaatgaagcctttttcagaatgaattccacattatatcttttgctcaaactcttcaatatatcttcaaacggagtgttcctgaaaatcaagcgtccgtccttccaacatgtttccacgtctacattgacttctttcacaacgaccttttcccgcactatatcataaataaccttttgccccggtatcatcattacattattcctcctgccgttatccacataggagaaactgactttacccgaaaccaaagtggtctgtaccgtcctgctccccttgtaagcctctacgttgaactccgttccatgtaccgctatctcggaattgttcagcgtgccgacaatgaacttcttttcatcttttgcgacagaaaagaatgcttcacccaccaacttcacttcccttttatcatcggcaaaccgggaaggataacgcaacgacgacgacgagttcagaacgacttccgttccatccggcaattcgacagaagtagtcattcccggatttgtcctgacttccatcatatgtatctcttctttatccttgtcccaataaaggatagaccacgataccatcaaagggatgaataaaatggcggccgcccgttgcatccctctaaataatacctgatacctattgacctttttctgtttcatcttacgatgtacatcctccaaggccttctttacatccagcctggatgaaatctgcgccatgtccgctgccagaccgagtgtctgaacctggcgggctgtcctgcggttctcttccgatgcctccagccactcctctaccagagcagtttcatcctccgttgtctctccttcataatacctgagaagcagatcctccattccctctctttttaccataatttttattgctagctttaatcaaaagacaaacgggcgaaaagaactcctaaacaaaaagctaaaaatattttatacacttagattataatgggaaaaaaagctatttttgcccaacaataatgaacccccaccctatgagaaacataccattggaagatacatctttattatccgccatacaaaaaggagatagaagtgcttttgatgtgttatttcaaaagtactattctgtgctctgcacctactgctatcgttttgtccggctggaagatgcagaagagattgttcaggacgtcatgctatggctttgggaaaaccgcgaaagacccattatcgaatattcgctcaagcaatatctgttcaaggctgtctaccatcgttgcatgacccggattgcccaaaatgaagtgaagcaacgggcagacaccgcttactatgaacgaatgttcgccatgctgcaggaggtggatatctatcaaatcaacgaattaagcaagcatatacaaagggccatcaacgaactgccgcctacttatagggaagctttcatcatgcatcgtttccagaatctgagttacaaggaagctgccgaactactcaacgtttccccaaaaacggtagactaccgcatccagcaggctttgaagattttaagggtcaagctgaaagattatctgccactgatattgatgcacctgctcacctcgcattaagaccatacataagcggaacgtcccctataccttgtcggctacacaccgggacttagccctaaagagtatagaactgagaggtcaaaacatccggatgttttaccccaatacatggggatgttttcacccaaaacacccggatgtattaccccaaaacatccgggtgttttaatggaaaggatgcggatgttatgacctctcagtatacgggtcagaccggttcagtcctgatgggagaggcactaagtccctatatatcccgtattcattaattattctaaaaaaagttagggaaaactccgggccaccggtcatataagcaagaagcaaccctattattatcataacctcaaaatgcacgcaatgagaaaactgattatcctattgtcggcgctggtgtacgtcatccatgcacaagcgcaattttcagtgacagcccatcaggaaggatgggacaatatccctccacaagtacaaaaaccgggattttcctttcagcaatccgtacttgccaatatggacggggacgatgcccttgaagaagtaatgcttttcggacatgacaacgggcactaccccactttcgaccttttcaaggcctactatgcaatcgtagacaactataccaaagaaatacaatacatttccgacgagatttatgtcaccgacaagtacaatctccttgtagaagaccgcaacaaggacggcatctccgagctctacatatcctacttcaaagacggaaagttcagcgtagacgaacaaggttacaatctgcgcaccacacgctgctacgaccgtatagaatggaaccctactggcaaaaactttaaatcttccggaaaatgaaaacaagactgacacttatcctggtactccttatttatataggagctgcctcgcacacacacgcacagcaaaagaaagtaatcaaaaccatgatgatagccgggcaggacggcagccattactggcaaggcgcctgcgaagccatgaagcagatattggaaaacagcggaatgttcaaagtggactttgcctttacacccgactttggtggagacatcgccaccttcaaacccgatttccaccaatatgatttaatcgtcatcaactacggcggagctacatggacagagcccgtacgcaagaatttcgagaaatacgttgccgatggaggcggtgtggtagtgatacattcttccgtcgtcccgatggccgactggaaagaatacaacgagataataggcatgggagcctgggacggacgaaacgaaaaggacggtccgtatctgtactggaaagacggacaatacgtctacgactactctccggggtatgccggctaccacggcttgcagcacgaaaccgtcatagaacaccgcgccccccatcatcctatcctgcaaggattgcctcctcaatggaaacacttcaaggacgagatatatacccgcctacgcggtccggtaagaaacatggaaatattggccaccgcctacgaacgcggacgacatgaaccgttgatgtggacagtaagctacgggaaagggcgcatattcgtcgacctcctggggcactgcggcaacgacccgaacatgacttactccatgcgctgcaccggtttccaggtgactttactccggggatgcgaatgggctgccaccggtgccgtcactcaagaagttcccgcagatttcccactgaaggatacttatacattacgtccggagttcaaggctccttttcatgcttaccctgaaaccaaacactgaataccatgaaatacatcatccgaacactgctgctggcatgctgctgcatgcaggcacaagcacaagctccgtggaaacccgatacggaactggagaaacaattacagcaaagcaatcatgtgcaccgcataatgaaagctaatcccgcacacgccggactgacgcggtgggaaaagaaaaaggtattgaaaagcaggggactccccctggccgaagatttcggcgctctgcgccacaccggacccggaaccatacatgtggaccgtaaagtcactgtctcaggcaaaggaagtgtccgtctggacactcctgcctccctgggcaagaagaatccaacaaaccggaattacgccaccccggagattatccgtcccctcgaccgggaagacttgcgggaatacaaccgcttttccgtttgggtatatgtggatgcaccgggcgtttatctgacctttgccggattcaccctatacaatgaaggggagaaaatcatgccgactcccggacgctttgaaggacaacacttcgagactgtctatcccaacaaatggcagcacatcatatgggaaataccggacctataccgtgactgtgtcaccggcttttcggtaaacatcatgctggcaggtgctcctgcaggagccagcgaacacatgagcctatacatagacgacatgcgcatcgaaaaggtagaagcggaaaacagccggggattcgacctgcgaaaagatgcaatggcctactgccacagcggatacaagccgggagcacgcaagcaggctttggtgcagcacgtaccggaaaggactttcagcctgcacgatgccgccacgggacaaaccgtttatcaaggtaaggccagtcctctgaatcaggacaagaagcaggacaaaggatttcttgtgctggacttcagcagtttcaatacgcccggacaatacttcctctccatcggtgatgtacaatcaaagcctttccccatcggaaatgatgcctacctgtctaccgcctggcacacgctgaacttcttcttttccgaacgttgcggtttcgaccagcccggcattcatcaggaatgccatcaggatgtattcgcctatcatcccgacggacggagcatgagcattgccggaggatggcacgatgcagccgacctgactcaaggaacgggaaatacagccgaatcgtgcatcgccctcctcgaaatggccggtgccgtacaaagcaaagacagtatcttctacgaacgcctgctggaagaggcacgctggggagtgaactggattctgcgtacccgcttcggtgacggctaccgactgggtggactgattatcggcatttggacaaagaatatccgtggtgacaaagacgacatgcagacagaagcacgaaatacgcctacggacaatctgaaagccgcttccagttgcgcactcgccgcccctcattttgaaaagaaagacccagtgtttgcacggtggtgccggaacagtgccattgaggacttccaattcgccatcgacctgctggatacacaaaggacggaacagaacgaaacagaactttatgcccttgccaccgtcacagccatgcgtttgtaccgccttacacaagatgtttactatctggactgggcaacccggctggcacgtaccgtcatggcgggccaacagttggaaaagcgtaccgactggaaaatccccctacgaggtttcttctatgaatcttcccggaaaaaacgtattctggcctattatcaccaaagccaagagcacttgatggctgaaggactctcgatgctactgacagatgcccctacccatccggacgccccgttgtggaaggcatcctgtgaagcctatgcagactatctacgcgggatttcacaactgattgagccgtacggcatactgccaagcgccgtatacgaggtggataataccgattataagaatctgtaccacgaaggagagcaggtaggacttcccagcctggaagaatacaatgcgcaagtacgcaacggcatccctctctcgaaggatttctatctgcgccgtttccccgtcgcctatcagttcaggggattccacgccgttgtcatgggcaaagccaaggctgcctttatccttgcacgcctattcaatgataaagcgttaagggatattgcaacccgccaggtagaatacatattaggctacaacccgtttgccatgagtaccgtttatggagacggatatgactatccgccgctttacggggcatacgccggaaatgttgtgggagccgtgcccgtaggaatcgaaacattcgaaaatgaggacgaaccctacttcccgatgcaaaataactgcacttacaaggaaatctggacacacaccaccgcacgcctgatgtggtgcgtagcagaactgttcaaataaacagttcattataccgctaaaaaaagctccggagttgaaggttccggagctttttctctgttttatgtgatggacagttatgcctttttcaatgctgcaatactttccttgagagatttgatgatactttcagcatctgcctgcttcttgcgttccatctcaagaacggcggcaggagcattattcacaaacttctcgttacccagtttcttcagcacaccctgcaagaatccttccttatgcttcagttcggcctccatacgggctatctcggcttccacgtcaatcatattacccaaaggtacggcatattccgtagtacctaccatgaaggaagcagcaccgtcggccttgttctccactatattgatggaggaaaggttacacattttcatgataaccgcgttgaatgccacaaccggattctcaccgataacctgcaactcaagtgtctctttttgggcgatgttcttctgcaaacggatggaacggatattgctgataacctctttcaccacttcaaactcccggatgatatcctcatctaccaatgccgacattgacaacgggcttaccatcaagctctcaccgtctgtacggtcgcaaagatgctgccacaactcctctgtaataaatggcatgaacggatggagcagatgcaacaagttatcaaagaaaccgatagttgcttcatacactttccggttgatgggctggccgtatgccggtttaatcatttccagataccaggaagagaattcgtcccagaacagtttgtaaacagccatcagcgcttcactcaaacggtacttgctgaacaaatcagccacttcggcagccacttcattctgcttggcctcaaaccagcgtattgccagttctgaagcttccggtaccggaacttccgcactgacttcccaacctttaatcagacggaaagcgttccatatcttattattgaagttacgtccttgctcacacagtgcatcgtcaaagaggatgtcattgccagcaggagctgaaagcatcatgcccatacgtacaccatcggcaccgtatttctcaatcaaatccagcgggtcgggagaattacccaacgacttggacatcttacgtcccagcttgtcacggacaatacccgtaaaataaacattctggaacggcatcttaccttcatattcatagcctgccataatcatacgggctacccagaagaagataatgtccggaccggtcaccaagtcgctggtaggataatagtagtttatctcctcgttacccggattgttgataccgtcaaacaaagagatgggccacaaccaggaggagaaccaagtatccaggcagtcctcatcctgacgaaggtcttccagtttaaggtctgcattacccgttttctcttttgccaatgccaaggcttcttcgggagtggcagccactacataaccaccttccggcaaaaaataagcaggaatgcgatgcccccaccataactggcggctgatacaccagtccttgatattttccaaccagttcttgtacgtattcttatatttggcaggatagaacttcaactcatcattcatcaccggcggcaaagccatgtcggcaaagtgctgcatcttcaagaaccactgcatggaaagtttcggttcgatgggcacgttggtacgttcggagaaacctaccttgttggtataggcttccactttctccaacagaccggcagcagccaggtccttctcaatctgctcgcgcacatcgaaacggtccataccgatatacaagccggcagcttcactaagcgttccgttatcattgaagatgtcaatgctcggcagattgtacttctcacccagcatgtagtcgttcacatcgtgggcaggagttaccttcagacaaccggtaccgaactctatatctacgtaatcgtcctcgataaccggaataacacgtcctaccaacggaacaatcaccttcttacccttcaaccaggtattcttggggtcattcggattgatgcacatggctgtatctcccatgatggtttcagggcgggtggtagcaaccactgcataacgtccttcggggtcaccttctaccatatacttcagatagtacagcttgctgtgctcttctttgtagattacttcctcgtcactaagtgcggtcagtgccttagggtcccagttcaccatgcggacaccacgataaatcagacctttgttatacaagtcaacaaaaaccttgagcacgctttcactgcgtttctcatccatagtaaaagctgtacgatcccaatcgcaagaagcacccagcttgcggagctgcttcaagatgatgccgccatgttcgtcagtccattcccaggcatgcttcaagaactcgtcgcgggtaaggtctgtcttcttgatgccttgtgcggcaagtttgttcaccaccttggcctcggtagcaatggatgcatggtcggttcccggcacccagcaggcattcttgccttccatgcgggcacggcgtaccagaatatcttgtatggtattattaagcatgtgtcccatgtgcaacacaccggtgacgttggggggcgggatgacgacggtgtaaggctcacgaccatcgggtttcgaactgaataatttgtggtccaaccaatactggtaccactttccctccacgtcagcgggattgtacttacttgctaattccatgtttttaaatctctataattaatttattgcgaataacgggcgcaaaattaatgaattaaaatttaaatatatatttttgtccctacaaaatgagtcaggagttagtaggagttaaagggagttatcgccctccgggcttaggagttagaggtcgatagtcctcttaatggtaggttgaaaataaaaatgagagacaaattgaaaatccggtatgtcgtattaattgtattactgtctgtcgtatgggcaacgcagctcattccaagcttgggagaagtgtatgcacagtccgtatatccggtaatttcccatattctgtcctccttttcaaaactcataccttttgccgtaggcgacttgttcattttcctcagcatcatcgggctcctcttcaatcccatcagggcacgctatatccagaagaagaagtggaaacagattctgctgaacgaaatggaatacttgctgtggatatatgtatggttctatctggcatggggactgaactactcacaaaaggacttttatggcaggacaaacattccttatactgcctatactcccgaaatctttcagtcatttgtagacaactatatcgacaagctgaatgcttcctatacagatgtcacctccattgacgaaccattggtctgccgggaaagcgtacacggatacaaccaaatcagcgatacgctggggatacaccgccctccccactcctctccgcgcgtgaagaccatgcttttcaccccgttcatttccatggtaggcgttacgggaagcatgggacctttcttctgcgaattcacgctgaacggcgatttgcttccaccacaatatcctgctacttatgcccacgagctggcacaccttttaggcatcaccagcgaggcagaagccaacttctacgcttaccaggtctgcacccgttcgcaggtgaaagagattcgtttcagtgggtatttctccgtactcccacatgtgctgggcaatgctcgccgactgatgagcgaagaagaatacgcagagcttttcagccggatacgtcctgaaatcatagaactggcccaaaagaaccagcaatactggatggagaaatacagtccgctcatcggagacatccagaactttatctacgacttgtacctgaaaggaaacaagattcaaagcggacgcaagaactattcggaagtaataggcttgcttatctcatacgaagaatggaaaaactaaatttcaaaaccatgcatacaagaaaagaacagatggaggccttcggccgcttcctcgacatactcgacgagctccgcgagaaatgtccctgggaccgcaagcagaccaacgaaagtctgcgccccaatactatcgaagagacttatgaactttgtgacgccttgatgcgcgatgacaagaatgacatctgcaaagagttgggcgatgtgctgctgcatgtggctttttacgcaaagataggctccgaaaccgatgatttcgatatgaaagacgtatgcgaccgtctttgtgagaaacttattttccgccatccccatgtcttcggcgatgtaaaggccgaaaccgcaggccaggtttctgaaaactgggaacagctaaaattgaaggaaaaagatgggaacaaaacagtgctgagcggtgtacccgctgccctaccctcactcatcaaggcctatcgtatccaagacaaggcccgcaatgtaggatttgactgggaggaacgcgagcaagtgtgggataaggtaaaagaagaaatccaggaattccaggctgaagtcgcccacatggataaagaaaaggctgaagccgaattcggcgatgtcatgttcagcctcatcaatgctgcccgcctctacaaaatcaatccggacaatgcactggaacgcaccaaccagaagttcatcaaccgattcaactatgtagaagcacacagcatcaaggagggtaaaaatctccatgacatgacgctggaagaaatggataagctatggaatgaagcgaaagcattggaaaaagaaagcaaacaagatgattcttctaaaggtcaggtttagctggctaaagcgaggtatctatcattaacaaaagaaggttgctcacatcattgtggcaaccttccttatttgtattcattcactattcatctttttccttgtgtttttcgtggagaagcatccccctttttatgcatgcctttcagtaattcacggtggaaacgcatttcagccctttgcaccagataaatctttttacaaggcaatattttcttgaacttatcaaagtaggtcttgtccaaccggtcagaagcgatacgggcatcatatacaccttccataatttcctcatactgggcttcggttgttttttcatctttcccttgtcgaagcaacttccaagcctcgtcatttagctgctttttccggtcctgcaattcaaaatacaatgggaagaacttggctgcctcctcactcgtcagtccggctttctccgttataaacgctttttgtttggcacgaaactcttcaggtgacagatgctggtcacatccatcgctagcccaaagcagaggcataatgccacatatcataaccaataaaacaattagtttcttcatttttaaatagttgagtgttgttaccttattctgcatcagagtctgccaaataaacatacaatgaataatcatccagcatggaattctctacggccatattaatatattccatttctgtttccgtatcatcagcagccatacgctctacagatggagtatgctccgaagaagctacacggataatcaatgccgcacctataaacatggcggtcatatacaaccaaggccttaccttctgccacattgtaggctctgtctgcacagcaatgagtttctctttttcgggaagccggttcattacctctgaagtaagattctcaaagtagccttcaggaacgcggaaaggattttccgtccctatctttttctgtattttatcttcttctttcataagctttctcctttctgtttaattagacattgttttgtggcaaaggtttaatactcctcacccaaaaacttttctattttcttcacggcatggtgataggaagccttcaaggcacctacggaagtaccaaatatatcggacatctcttcgtatttcatttcctggtaatacttcaggttaaacaccatacgttgtttttccggcaaggcaagcaaggctttttgcaaagccatctctgctttatcaccggagaagtaaggatcactttcaagcttttgaagtgcatctgcctcggggtcatccaaagagactgtggaagcagcccgttgtttgttcagaaaagtgaggcattcattcaaggctatgcgatagagccaggtagagagtttagcctctgccctaaaataatctatattaatccatgctttaatgaaagtattctgaagtaaatcattggcatcttcatgagagaggaccatacgacgaatctgccaatacaactgctcgctatattgggtaacaatcatctcaaatccccgcttttgtgtgctttcttcttgtagaagagccaacacttcgcgttcattataggaaggggtcataaatttctattcgcatttgttgttttagactgccaaagatacgaaaagtttaattcataccgatacacaaagtgtttctttggcaagctgagtatccggaaaaatagcggatgcttcttgaagcaagacattttcatcttcgtatcgtgccgaaaaatgtcctatcaacaacttcttcacctcagccctcctggctatttcggccgcttgtgcagcagttgtatgaaatgtttctttggcacgtggcgcatcctcattcgcaaatgtcgcctcatgaaaaagtaaatcaaccccttttatctgctccacgatagaaggaagatagatggtatccgagcaataagcataactgcgggacggagcagaaggacgggtcaacaagttgttggaaacagtttttccctccggtgtcacgtaatcggccccattctttatacgattcaattcgtataccggcacttggtagaaatcgaccatttcacggataatatggttaggacgccgcttttctgcaaacaaaaaaccacaacacggcatacgatgacgcaaaggaatggtagtaaccgtcaacgaacggtcttcataaatcagcatcggttctttcgtatcaaactcatgggaaaggaccttgtacgtcatctgcctattaaaaaaatccagcataggtgtcagtaatgtttccagccctttgggagaatggatatgcaactctgctgtacgtcctaaaaggttaagtgtagaaatcagtcctaataagccaaaacaatggtctccatgcaagtgagagataaaaatatgattcaaacgtgaaaacttcagatgtgatttacggaactgcaactgcgccccttccccacaatcaatcataaacaacttgtcgcgcacgttcacaatttgagacgtagggaaatgacgcgttgtgggtaaagcggaaccacaaccaagaatatgtaactcaaatttttccattccaaaccttccgaactgatttctactccttgatttatagaagagcctttatctctgaaactccaaaagatatttcaaaagtttctccggatttattccctttatacagatagcccacccctttatcacacttcacacatacttccaagaacatgcgcaaggctggatcggaggagttcaaagagttcttcacatttgccttcatctgttcggcattttccttcaaagcagacatctgtactacagattcgtcaatcgtataatgataaagcaccttatccgactcgattgtcagtttattgagcatagtggcttcatccacctgcatcgggcacgatacgttggtcatcttcacttgctcttccagtttcttcttatcactgctttcagcagttgaaccgccattcaatatatctttcaagtcctgagtagtcagataacattccacttcgttaccggatgtctttcctttatatatgaactttataccggaatcagtaccgacaaccaaatccagcatctctttaatggacccttgtggattaccgaacataacagtcacagcagacttcattgcatcaggattctctttcaaagcgtctatattgaggaaactttcattcataagcagtacatataccacatccgacccatcaaaagtaatactggatatttcgccggaagctcccatatccatgggacattgtttgttggcagctgcgatagccagcttgagtttggacttctggccgcatgcggttagtaacatcagcgacaggcaagtgaacaacaccatcttccctgcatttttgaacatgtttttcataataaatgaaaattaaattattgaatatttctatgattgcaaaagtaaccaccctgcaaagataaacatttatggaaaaaccatccttaattccataaaattctattgacaaatcataaaaaagaagggcacttgtttgcgcaagtacccttccttcatttatagaacggagtaattatttctttccagcttccatctgttccttcaaggcagccaaagcgtcgatgtcacccagagtagtagatgcagcctggttttggatagcaggagcaacgtcttctctcttaccggttgacttcttagtagcagccttcttttcagctctttcttctgcctttgcagcatcttcgaagatacggctgtgagaaaggatgatacgcttagcgtccttgttgaactcaattaccttgaattcaagcttctcgtccaactgagcttgtgagccgtcttccttaacgaggtgcttcggagtagcgaaaccttctacaccataaggcagagcaactacagcgcccttatccagcatttcgatgatagtaccttcgtgtaccgaacctactgtaaatacagtttcgaatacatcccagggattttcttcgagttgcttgtggccaaggctcaagcgacggttttccttgtcgatttccagaacttgtacgtcgatgtctgcaccaatctgagtgaattcagacggatgtttaaccttcttcgtccaagacaggtcagagatgtgaatcaagccgtcaacaccttcttcgatttcaacgaatacgccgaagttagtgaagttgcgaacttttgcagtgtgcttgctgccgataggatacttctcttcgatagtttcccaaggatcagacttcagctgcttgatacccaaagacatcttacgctcttcgcggtccaaagtcaggactactgcctcaacttcgtcacctaccttcatgaagtcttgtgcagaacgcaagtgctgtgaccaagacatttcagatacgtgaatcagaccttcaacacccggagcgatttcgatgaatgcaccgtagtcagccataactacaactttacccttcacgtggtcgccaaccttcaggttagcatccagtgcatcccaaggatgcggagtgagttgcttcaagccgagagcgatacgcttcttctcatcatcgaagtcaaggataacgacgttgagtttctggtcgagttcaaccacttctttcggatcgctaacacggccccaagaaaggtctgtaatgtgaatcaaaccatctacgccacccaagtcgataaatacaccataggaagtgatattcttaacggtaccttcgagaacttgtcctttttcgagtttaccgatgatttccttcttctgttgttccagttcggcttcgataagagccttgtgggaaacaaccacattcttgaattcctggttgatcttaacaaccttgaattccatagttttgccaacgaatacatcgtagtcgcggataggcttcacgtcgatttgagaacccggcaagaaagcttcgatgccgaatacgtctacaatcataccaccctttgtgcggcacttgatgtaacccttgataatttcttcgttttccaaagctgcgtttacgcgatcccaagaacgggtagcacgagctttacggtgagacagaacgagctgtcctttcttgtcttcctggttttcgatgtatacctcaacagtatcaccaaccttcagttcaggattgtaacggaattcactcatcggaatgataccgtctgatttgtaaccgatgttcacaactacttcacgcttgttcattgcgattacggttccatcaactacctcgcggtcgttaaccttgttcaacgtattgtcatacgccttttccagttcttcgtggcttgcactggctactgattcgccgttctcataagcatcccagttgaagtcttcaataggagctacattctttaaattttccattaataaataaattgtttaactcgttaattaagtgagactttatgttgactcattgtaaatcgggcgcaaagatagaagtattttcttgaactacaaaacaaaaagcattcaaaacagcagtggaataatcaattaaagaataaaaaaaatgttacctttgcatcgtttcatttatacataatctcaataatttatcatgaaaaagataatcgcatgcatttccatcatttgctatacattattatgttatagccaaaatcagacaacggacaacaactaccgtacgcaaaagaacatttcctatcttcatcccggcgaaaaggacagttataagctggagcgttgtaagctcgacctccattatcctactgataaaaaaggatttgccacccttatctggttccacggcggaggactggaagccggagaaaaacattttccgaaggagttcctggagcaaggctacgccgtgatagccgtaaactaccgactcagcccgcgtgcccaaaatcctgcctacacggaagatgccgcagaggccgttgcttggactttcgagaatatagaagaattcggaggagataaagacaaaatatacatagccggtcattcagccggtggttatctctgtctgatgctcaatctggacaagagttacctggcaaagtggaatattgacgccaacagcctggcaggcgctttccccatcagcggacagaccactacccactacaccatccgcaaagaacgcgggctgccttccgacactccgattatagataaatatgctccttccaataacgtaagaaaagacgcttcacccatgatacttatcactggtgacaaagagttggagatgctggcacgctatgaggaaaacgcccatttgtatgctctcctcaaagcattgggacaaaaaaccaccctctatcagatggagggatttgaccacggtacggtggccgctcccgcatgtaccttgataaacagctatatgaagaaggcaggcaagaagtaaccactacccttgcctttcttttacgtatgccaatgccgctcctattgctgttctatattcagcatagggcggtatatgaaaatgtacatgatagatggcttccattttagaaaacacctcccggcactggggcagttgggtgagatttcctatcagaacgaaatccttgataggactgttcaaagctgacagtacagcagctcctccaatggtttgaagtaccgtataaattataccgcaggcaatatcttcttgagaagcattgctatctgctttcccgaaaagagaggcggtagcactcactggcaagtcaggcaaagcagtgttgcaaatatcacctatctgcaagttgacacgagttacatcccctttctcagccaactcggacacctgatgaatatcatgagttttcaacagcaacctcgataatccctgcaaggtacctccaccaatccccaagccgccaatatgctgcaccttgtctccgtctattttcacaaaagaagtgccggtacccatgctgactacaatcagttggtctatatccgttgcatgtctagctcccaaaccattggcaataaactcatccgttttgcgagtaggcagtccatatagagggctgttgacaaatgcgcttcccactcccgtcagcatcacctgctccacatcggccagctgtataccattgtcataaatatacttaccgaatgctccgaataaggaagtcaccgggtcggtagccgtaataaacattggagactgtatctgttctccattgattccaacgattttcgtggtacttccacccacatctattcctattactatacccatagctccaagtaatttgcagcaaagttacaaaagaatcaataattgacaattgattaatgtgataatgtgccaatatgctaattggctaattggctgcgctatgtttatgctacgccatcacctcctggtcattgacacattggcacattaatcacattaccacattgctatctgttaaacagttcgaaggtaaatttgcaacctatttcctgatacttccagtttgcaaagctggcaaacaagccaaagtcaaatatatgtgtaccaatgccataccctacttccagataaggtttcaagtgaggaaccaccaatgcattcagatacagacgttcattcaatacatattgggtatatttcatcagatggcggagcaggaggaaaggagcttcataggtaaggtgtccgcggatatatttacgggaagagttataccagcggccgtccagcaactggaacaccccgccaatatcatcactccaacccataggaagattggaacgccgcaaattggcaaagtccacaaagtacagttccttctgattggtaaactctccccaaccaaaacgccaataaatatcacgcatcaagcccaaagaaacctgatgctgcaaatcaatctctacacgctcgtacgaaccactgctctgcaacactccactgagtccccgctcccaatctactgagatggaaggatacttggaatgaagatttactttacggtcgccattcatataatagtattgtcccggagtccaggtgaggcggacgcggggagcaaaactattataggtatggcggaacttgttcaggatattcgggtcaaaattcggaaagaaggatgaacctccggaaccggcacgggtggccgacttggtaggcggcatgctcgggtagttcagttcaaaccgggagcggttcacttccgtacgtctgtgcatggatacacccacttccagcgacagaccgtttactatttcccagctatgacgcagattcagatacaaatccttgaaataatccaagtgtatctggttgaagtcaaaaatactgtcggggatggctttcaggtcgtccagcacatcactgctgtaaatccggttaccgttaccaaactccagatgcaatgctgcacgcttacggggccaataatcaaaatcggacctcaccctccagtaaaactctttttccttaaaattataacctatccggggaacgatgcgcagcaggcgatcaccggtaaaaatacggttgtacttgaactcctgccgatacgaaattccatgcttgccgctatagctcaaaagaaaaggattgattagtggtgaacagcgcacactccccaatttatcaaggtctaccgtatagcgactgatcaatgcatctccaatctgcccccaaaactccaagttcttattcaccggtttctttttccgggcgagcgtatcccgacgcaagaagaaatcctgatacagtgtctcctcatgcggagtcaaaggaatgggacgcaaagttttaaagtaagcagtatcacgtagataagcattcgtatcagtacgcaacgtgtatgaatcggacaagtcatatttacttttcttcaccgacctccgtatatcactgccagaagttttctgaatgatgttcttataatcgagtacagcttcataagtgccatctaccacatttcccaaaaaacggaacgttgcctccacatcatactgcaacggaagaaattcgtccgaatcgcccacattacccatcttcaccagattattgaaccgcaccatctcattacgtccggaaaaacgcatctcgcgtacactccacacgttatcactcacaatcagataaccgcccaccagctgaaagcttttgctttttggcataaaacggattttatactgaagggcatgccgttcccccatcaccgtatcaatccgataggtataatattttttggcattgggtgctaaaggagagagtagtttgtcatataataaggtagaagaatagatgttgatgtgaaaatattccggcagccgtccgtccatttcccaaaactcggaagcagtaccgacacttgcctttaccttctggtcatagatgtcgggagcagtaaaatgcaaatcgctataagtttccatcatatattcccgcacccctttcttgggccggaacatggaagggatgtagcggagaatatgattcttcttacggatattcacccagccctttatgtaaagctcagccttgtaactttcaataatacgttcataaaggggggcaaagaagatgactttctccatgatggagtctgccgaactcacatgtttgtcaaccggataagatacacgctccgcccctgccttctgtacaaaagaaaacaagaagcaaatccaaatccatataaacaacaaacgtttcaaccgcaatttctccttatagaatcgggacaaatatacggaagaatttgtgtaatgcaaaaacatgttccataaagaagcgggaatgacacttgtgacaccctttattataaaacatatgttacgcgcgagagacaataatacacaagcacacatagtttgtgcgagataaatacgaacctatattaattgttataaaaagggtgccacaagtgtcatgtacagaatgattcgtaattgtgacacatgaaaattactaatcacgacgcactaaaattactaatcgtgatgcggaaagattactaatcatggcatgtaacaaacgcaagcttttggtcgtttttccataacaagcagacttttttagggggtctattctcaaaaaacactaatattttcgagaataccccctaaaaaagagggggtagttcagaaaaaacatgtatttttgcgcccaacaaccaataaaaggagagacttatatgtcaaaaatgcgattttttgctttgcaagaacttgccaatcggcaacctcttgaagtgaccaccccttcaaacaaactgtccgactactacggcagccatgtcttcgaccgtaagaaaatgcaggaatacctgcctcgtgaagcctacaaagccgtgaccgacgccatcgaaaaaggcactcccatcaaccgcgaaatggcagacctgattgccaacggcatgaaaagttgggcaaagtccctcaacgtcacccactacacgcactggttccagcctctgacggacggaacagccgagaaacatgacggcttcatcgaattcggagaaggaacggaagtgattgaacgtttttccggcaaactgctcatccagcaggaaccggatgcatcctctttccccaacgggggtatcagaaacacattcgaagcacgaggatatactgcttgggatgtttcctcacctgcctttgtggtagataccacactttgcatccccactatcttcatctcttataccggcgaagcgctcgactacaagactccattgctcaaagccttggcagccgtagacaaagcagcgacagacgtatgccagttgttcgacaagaatatcacacgcgtttataccaatttaggctgggaacaagaatatttcctcgtcgactcggcactgtacaatgcccgcccggacctttgtctaaccggacgtaccctgatgggacactcctcggccaaagaccagcagctggaggaccactatttcggctccatccccccacgtgtcacagcttttatgaaagaactggaaatcgaatgtcacaaactgggtatcccggtcaagacccgccataacgaagtagctcccaaccagtttgagctggcgcccatctttgagaatgccaaccttgccaacgaccacaaccagcttgtgatggatctgatgaaacgcatcgcacgcaagcatcacttcgccgtactgcttcacgaaaaaccctacaacggcgtgaacggctccggcaagcacaacaactggtcgctttgcaccgatacgggtatcaatttgtttgcaccgggcaagaatccgaaagggaacatgctgttccttaccttcctggtaaacgtactgatgatggtatacaaaaaccagaacttgctgcgcgcctccatcatgagtgccggaaacagccaccgtctgggagccaatgaagcgcctcccgccattctgtccatcttcctgggcaaacagctgtcttccatcctcgacgagatagcccgccagataagcagcagcaagatgacatcggaagaaaagacaacactgaaattaggcatcggacgtattcccgaaatattactggataccaccgaccgtaaccgtacttctccattcgcctttaccggcaaccgctttgaattccgtgccgcaggttcatccgccaactgcgctgccgccatgattgccatcaatgcggctatggccaatcagctgaacgagttcaaagtatccatcgacaaactgatggaagaaggggtcggcaaggatgaagccatcttccgcattatgaaagagaccatcatcgcctccgaacctatccgctttgagggtgacggctactccgaacaatggaagcaggaagccgcccgccgtggactgaccaacatctgccacgttcccgaagccttgatgcactacatggataaccagtcccgttccgtactcatcggcgaacgtatcttcaacgaaacggagcttgcctgccgcttggaagtagaactggaaaaatacaccatgaaggtacagatagaaagccgtgtattgggtgatcttgccatcaaccacatcgtaccgactgccgttatctaccaaaaccgtctgctggaaaatctccgtggcctgcgcgagaccttctctcccgaagaatacgaagtcctcagtgccgaccggaaagagcttgtacgcgaaatttccaagcgcgtaacagccatcaaggtacaagtacgcgaaatgaccgaagcccgcaaagtagccaaccacatggataactacaaagacaaggctttcgcttacgaagaaaccgtacgcccttatctggaaagtatccgtgaccacatcgaccaccttgagatggaaattgatgatgaaatctggccgcttccgaaatatagggagctgctgtttacaaagtaggcctctccctagcccctcccccgtagggagagggatagagatactacgataaacaattaagttactacgatttacgatttgacggtttacggttggagttactcatacaatcataaacccacctgctaatgagtagttgtttaacaatacaaacttcaatcgtaaatcgtctaatcgtaaatatatagattttccttcatctccccccctacgacatctttttgtcatatttgtgcaatatttaattttttctttttacatttgtgctgtataacacagttttgcagcagttatggtaaaagtaaacttgtctgatattaatgttccggagttgattgcagatatatggtctcccttgaatgacgaacaacgggaattcctcgccaaccacttcacactccagaactacaaaaaaaacgaagtcatccattgcgaaggcgagacacctacgcatttgatgtgtctgctgagtggaaaggtcaaaatctataaagacggagtcggtggtagaagccagattatccgtatgattaaacctgtcgaatatttcggttaccgcccttactttgcaaaaacagactatgtcacggcagcatctgcattcgagccgtctcttgtttgccaaatccccatgactgccttgatgactctgctcacacaaaacaacgaccttgccatgttcttcatcaagcaattgtccgttgacttgggcattgccgatgaacgcactgtaaacctgacgcagaaacatatccgcggaagactcgcagaatccctactattcctcaaagaaagttatggtttggaggaagacggctccaccttgagtatctatctctcgcgtgaagatctggccaatttgtcaaacatgaccacttccaacgccatacgtacgttgtcacagtttgccacagaacggttaatcaccatcgacgggcgtaaaatcaaaatcatagacgaagaaaagctgaagaaaatcagcaagataggataaggaataagtgacaagggataagcgattaggggttagcataataaaaacacattgttgccatcctaacccctaatcactaatcactaaatcagtcctttcgcagacaaatatctttccgcttcaatggctgcctggcaaccagttccggcagcggtgatggcttgacgatagtgaggatcagcaacgtctccggcggcgaatacgcccggcactttggtacgcggtgttcccggctcggtgacgatataacctacttcgtccgtatctacataaggtttgaaaatatctgagttgggtttatggccgatagccaagaagaaaccgtcaatagccacatcatagcgcttctcatcaggttcacccatacgctgtaccaaatgtacaccttccacaccgttctctccaaacaagcctacggcattatgttcgaacagtacttcaatcttgtcatgcttcatcacacgctcctgcataatcttggaagcgcgaagataaggtttgcggacaatcagataaaccttggcagccagtccggcaaggtaaacagcttcctcgcaggcagtatctccaccccctacaacagctaccgttttcttgcggtagaagaaaccgtcacaagtggcacaagcgctgacacccattcccgcatatttcttttcatcctccagccccagatacttcgcagcggcacctgtagcaataatcagcgtttcagcctcaatcatcttttcgtcatcaatcgtaatcttgtaaggtgcttcagcaagattggctgcggtagcaactccataacgcaaatctgcaccaaaacgttcggcttgcttccgcaggtcttccattaattccggacctccgataccttggggataaccggggaaattctccacatcagtagtggttgtcaactggccaccgggctgcaatcctgcataaagtaccggtgaaagattggcacggcctgcataaatagcggcagtatagccggcaggacccgaaccgacaatcagacattttactttttctgtttccatcattatattatttactatttacaatttactatttagcgcatgtcgatgacttcagccgtgggataggcttttttgtcaaagacaaagaaactatccggataggattgtccggtctggtagttattaataaggatagtagtcatatacttactcccccgtggtgccaagtccacttgatgcagacgatacgtatcctttgtcacaaacagatagacactttcagggtctcttctcttgtcggcagcagtcatggtgatgtaataaacagacttgtcttgcttaccaccgacactgctcaacttcaatctgtatccctgcttgtagagggacaaccaagcatacggattaagagtctgcaattcctcctgcgtaggttccgatacattcacctcatctgccgaagccacatagctccactgcgtatgtccgtcaaaccaagtcttcattccctcggtctcaaccacaaatttctcaccttccagatagagaactcccgcataagagccttgttgttcgttcacggtaaacgccagcttcacccctcccgctttccgaaaggcttcggctgtacgctccaatatattcttggcatccggttgttgtgccgacatcggcacagcaaacaacagcaatagcacaccaagtaaaagcttatcaagtttcatcattctataaataaccattccttattgcaaattgtttaaccgcatttccaggtcgctctcatctatacagaacacctcacgcgccttactaccttgcgccggtcccacaatccccgctttctccaactggtccatgatgcggccggcacgattataaccgatggcaaacttacgctgaatgagcgatgtggaaccctgctggtgaataacaacgagacgggctgcatcctcgaacaaaggatcgagacgtcccatatccacatcccccaaatcacctcctgtattttcatccacatattcgggcagatagaaagcagtggggtaactctgctggcgggcgataaacttcgtaatctccgccacttcgggcgtatcaataaaggcacactgcacacgcaccgggtcagctccctgtaggaataacatatcaccgcggcctatcagctggttggctcccggacggtcgaggatggtacgcgaatcgaccattgccgatacacggaaggcgatacgcgccgggaagttggccttaatcgtacccgtaatgatgtttgttgtcggtcgctgtgtagcgataatcatatgtatacccacggcacgcgccaactgggcgatacgtgcgatgggcagttccacatccttaccggctgtcataatcaagtcaccgaactcgtcgataacgactacgatataaggcatgaacttatgccccttttccggattcagacgacggttgatgaacttctcgttatactccttgatattgcgcacatgggcagctttcagcaagtcatagcgagtatccatctccacacagatggagttcaaagtctgcaccaccttcgtgacgtccgtaatgatggcatcttccccgtcgggtaatttcgcgaggaagtgatgctcaatcacggagtagatgctgaattctacttttttggggtctaccagcacaaacttcagctctgccggatgcttcttatataataaggaagtgatgatggcattcaaccccacggacttaccctgaccggtagcaccggcaacgagcacgtgcggcatcttgcacaaatccaccataaacacttcattcgtaattgtcttacccagtgcgatgggcaagtcgtaagtagactcctggaacttcttgctgccgataatgctctgaccggatacaatcttcggattggagttgggcacttcgataccaatcgtaccctttcccggaatgggagcgatgatacggatgccgagcgccgaaaggctgagggcaatatcatcttccagaccgcgtatcttcgaaatgcggacgccctgctcgggagtgatttcatacagcgtcaccgtaggacctaccgtcgccttaatggtactgatttctataccgaaactacgcagagtattgataatcttatccttgttcgcgttctgctctaccatgtcaatggtcggaccattgtcatcgtaatgcttcatcaagtctattgtggggtaatgatagttttccaaatccagacggggattgtacggctccttctccgttcccacatactcctcctcttcggccttttcaacctggaatgccggctccttctctaccggctgttcccgaaaagggggcaccggctccggtgcaggagtctcaaaagtcatggtaacatcctcatccgcagacttggctggctttacctttccatcacttccacccaagtcaagggtgatttcattcagcggttcgtcctcttcttcctctgtagcaacctcctcctccttttcaagaaccttttccggctccgcagcttccggtgtcggagcagtagtcttttcctttgcaccccaagaggtcttgaactcttccggcgtttcacccagcacgctttccgccttctccttacgcttcaagaagctgagactaaacaatctgcgcaaccagatgacagtccgtgcactcagatagatgaggaagcagatggcagttaccaacaatagcagccatactcccggcacaccgacttgagacacaagccagttgctgacattgtatccgtgcataccgcccagatagaggaaagagtccttgtactggtctacaaacacaaaaccgaaaaataccgagaaccacaccagcatcaacgaacagccgatgaaccacttccacaagcgcaccacacgcacccgcatcagcttcaatcccgccacagccaggaacacgagaatcaggaaagacgatacgccgaaacaatcatttatcagatagctggccaactgcgcaccgcggctaccggcgtagttcttcaccccattattggtggaaatcagctcctgcgcactgcctccgtcaatgatgctctggtctgccgctcccgtgaaaaagaacgacgaaaaggcgagcaacaaataaaccgaaaagattaccagtaccaagccgataacgaaatgaacagtttcacttctaaataacgctgccactttcccaaaaaacgagagtgacagctccgtatctttagctgttgaatttttctttgccatattttttaaataactattgagaattgattgcaaaaataataaaaactatccttctgccgcgttgttttcattctttaatttctcgtctgccgattataggtattcctaatctacaactgtagttttatcgcatgttttacttacatgcttgcatgaaatgacatagcgcactaatttacaacagattgcgccatgcaagcagacctcatgcaagcatgcaggcagattttgcctacatgacgcaatccatgcaagccctatacgcatcaacctactctttttccttcaaaaaataaatcggctgtttctgcaaccctttgttcaccaacacattctcctcacaaagacgacgaatctgccgcgtcgcagtcgtgcgggtcatgccgcaaatcgactgtacaacactgcgggtgatgaactcattcttacgtagatagttcaccactttttgcttcacctcatcatccgtcagcctctttttcgtgagattccgcaatttcagcggctttaccttcaatactcctatctcactgcgcagcgccttgtccggtctgaaagtgatgtttttcaacttcaccttagtacttttccgctttgtctccagtgtcaccggttccgtgcaggtcagcgtgggaacaaagtaaccgatgccgtccaaatgtacctgcctgccctcccccagctcgcgtcccacaaaatgcgacaaagcatcgagtaccgctagtacatccgtctcggtcagcgagcagtattcttgtatatgcctgcgcagctcatcggtcgtcgtggagccgttcagtttaatccggggatgcagggtcagttcttccccttgtttatccttcgttttcgggttttcgtaccaatcaaataaaattgccatattctttcctccatttttagattcatttctgttgctgtctgcaggtttcgctcatgcaaagtaccggctttcattaggcagagcatgggtcttccttacgcaaagaagcgttcttccttctgctgaaagcttatcaaaaaaagatgcgcacagctgtggtttaccttcttcatatttgtgatacaccttcttcacaactatgagaaagacattccacgactgtgcgcaactacaaactacagaggcaaagataatgaaaagcagggggcttggcaaaggaatgctaatctttttcagattgaagcatgtaataatgcggtaataatagcgctatttgcccagttccataattgcaataattaatcttcatcatcatcgtcataatcttcatcgtagtcatcatcgtcaccatcccatctacacccacaagcatcacaagcataatcattaataccacttgaatcaggatagaccaaatgcgagccacactcagggcaacgcaacttgttgttatcatcatcgtcatccgcaatttcatcacatggccattctcttccacaatccggacaaacataattcacgccatcgaaataggcattctcattcaaacaaaaaatacattccataactatcttatttttaattattacttttattcattattctttttgcatataagcagcatttaatcagcacaactcccaccagcatagaacagacaatgccaattgcaatgaaaagaggacttctatcagcggaagcaatgccgttttttgccaacaccaaaagtcccgtctgaaaacaaacggccgacaacaagcagaacagcagcacattgcgtttccaatgttttggcatcggttcatttttttctacctcttctaccatttccttcattgcttcttcaatccatatcttcatcttcattgtcttgaggatttatttcatatttggggtctaaatcatatctgtacgcaagcaaaaaatcggcctttttatctttgggtttacaaagagaatacaatatggcccctactaccaatggggcagccgcaacaactgcaatccctgccagcataccacctcctattataccgccaattgcagccaatccggaggttattcctgctgccgacaacccagcaacaacacctgaagccgaaatcaagcttatcattcctgccaccgtacaaacagatcctccacttgccattattttggcaaccaaatcatctttgtcttttctagtcatctttttgtaagcatcaaaatctttgcctaatacaacggtgaacatgatacagaattctgcatagcacacgtcagtaggatagctcttgccctcggccaaacgtgtaattgcgtacttcgacattgtcatagccactgcaagttcatcaatagaaatagaagaattactcatgaatgaacgcaaaaacggagcgaaaccgactccttttggaaattcttgattttccataatctttttttttaaagtttatattatggcgccctctgcctataaaaacaaaaagcaaccgttagcattaacgattgcaaaaatatgggggaagaatcaagcacgaaatagacgtctacgaaaaaggcaatcaacctctttatccattcctcatgttctttttaaattcttcccattgccagtcaggaaagttcaatgtatcatttacgattctccacgcgtcctttggcaggtctaatagagtttgcaatattttccatgcatttattattatagatgtagcatcgccctttgtacacacctttcttagtgttgccccgaaagatctgccgttcattgtcatcagaatcttgttgatatgcgtgtaaggaggtgaaacagccactattctattattttctttaccacacttagaagtatctaatgttttcaaataaaattgcatataccccagaagaagtataatcacatagacaaattgtttattagttttcttctggaaatctcgctctttcacatctccgtttcctactatccgccacgctgcctcatagtgtttttcttttgttaagtatccactttcagtggccttttccagcagcttctcaaacaattttttatttgtcttcccctttccctttttcgacattcggcctatcttttcaagcagttcctgatatgcctcttttgtaaagttaacatcagcagagaaacgtatcttatcctctttttgagactctttccgggagtcagaacgttttctcagagcctcaacatcttcattttcaagatacccctcatatacacttcttataagacgaaccgcccttgcacccacctccacaatatcctcatcttcatgaagagtaatccaaaagggccaataagtatggttgttcgcattatttgtaggcttaaagcgatgagtgaaaaatttccccggaaatgtattttcaagaacagcagtaacataataacgaatatcttcccattcttcattgaacatggccatcctatctttatcattctcatcaagaatcagtcccttacacccataataaataccgacaaccggttcatacacatcatattctatcagaaattcataccctctgcatccatccttactatacaatgtctccagcttatacatcatgtgatgcggagccttgtttccatgaaaagaagcatccgctttaaaatcctccacttcatccaacaacctcatcttctttttccttaattccgcaacactattacaaatataactttttaagtacctgagcaacaaaaagttgctcaggaatttgccatgtcagatttttcacctatcttagtgttgcaaatcaaaatatgtatcaaacccgacagacatggcaaaggtagcaattaaatccgagaaactcactccttttggaggaatattttcaataatggagcaatttgactccagactctcatctgtaatcgactcaaccctcggtatgagatgcaggctgtatggttatcaatacagcgaaatcatccgttcgcttatgagcgtttatttttgtggcggctcatgcatcgaggatgtcaccactcatctgatgtaccacctttcgcttcatccgacacttcgcacatgcagtgccgacacgattcttagagccataaaggaactgacccaggataacatttcctacacatccgacactggcaagacctacgacttcaacacggcagacaagctgaatacactgctcctcaattgcctattgtccacagggcagctgaaagagggcgaggggtatgacgttgacttcgaccaccagttcatagaggctgagaagtttgatgcgaagcctacatacaagaagttccttggttatcgccctggcgtggcggttattggcaacttgattgtcggcattgagaacagcgacggcaacacaaatgtccgtttccaccagaaggacacgctgaagaggttctttgaaaggtttgaacaaaacaagcttattatcaaccgtttcagagctgattgcggctcgtgttctgaagagatagtggaagagattgctaaacactgcaagaccttctatatccgtgctaaccgatgcagttcgctctacaatgacatctttgccctcagaggttggaagaaagtggaattgggcggcattgagtttgagctggcctccattctcatcgagaaatggaaagggaaggcataccgtcttgtgattcaaagacagaagcggatagacggcgaactcgacctgtgggaaggagaatacacctaccgctgcatccttacaaatgactacgagtcttccgagaaagagattgtcgaattctataacctccgtggagggaaggaacgcatcttcgatgatatgaataacggattcggctggaacaggcttccaaaatcctttatgggagaaaacacggtgtttcttctgcttatggcactcatacgcaacttctataaattcatcatggcgaggcttgacgtgaagaggttcggactcaaagcaacaagccgcatcaagacgtttgtctttaagttcatctctgtgccagccaaatgggtcaggacatcaaggaagtatgtgctgaatatctattcatgcaacaatgcttatgccaatgtgttccagaatgactttggataacaccgacaacttatagtcgtgattttgcgtattgcctcaagtcgcatggtggggtaaggggcatttatatgtctttatggtgacattcgatgcactgtgccccctttttactaacgatgcagattcttttcgcttctgtatcatattaggcgcgtagttgcggatttgaggaaataaagaaatacagaatgttatgagatatagagtgtattctcattttgatttctctgtaatattgaatacagttggatatgtgaaactctaaaatttatagctatgaagaaattaataaagaaaccaattggtaacagagagataatgcggaactatttctctactattggacttgttcctataatgaagtccaagaaaagatgttaatgattaagtgttcagaactgaaaaagccaacttatccgtaattggataggctggctttttgcattagttacagtttcactagactattcccatgtgaaagtataaattgtagtttctgttcttgtttcattattatctaggcgtttgtaagtagatacttcagtacagctttccacatatccgtctttatcaaatgtataggtatattgctctgtagtttcgtcaatttcatctttgctatatattttgtctggaagttggttgcatctcattcctgccaattcgggatgtgcttccaataacggacgcaaatcatccacactccataccattatcgggagatagcctttacaagtttttccactataagacaattcgtgaatatcttcatcgctaaagctccatgccattttagttaatttttcaccttgccatgtgtaagacagatagtcctcttcatcatattgcaattttactagctgattgtttgcattataagtaaagtctgtattatccaaatctcctccgtcactatcagaagtatgtgttatcaatccattttctaatgtatatgtgattgcctctccatttctgctttcaatgattttgtttgctccccaagtgactgtataagtactggtgtgtgtgctaccatcgtattgttctgtgtttgtagctgatattagcttaccattactaccgtaggaatattcagtaatagataccccatcttcgtttgtcattcttaattcaataagtagcttttgattggtgataacaccatcatcatttttactaggttcttcatcatcactgcaagaagtgaaattcacacacatgactatggctagtaaagccattccaattaatctaaaagttttcatttctgtttgatatttaagttattaattatgttgattaaatcactggatatttatctttggttatagcgtctaagtattctgcttcttaatctaatatcaattattattgcaatgacactgaaaaataatattggagaacagaatgtaaaaagcatatctataaaacttctaaggttctgtgttggaggataataaataataaacagaactgtatatattacgaatatactccctgcaattatgctgaatttcaagtaatagttacaattcttcaaaatttcttcttctcgttcttcctcttttcttcgtcttttctggtctatctgaaattctcttatttctttttgcctagtttcttgctgttgcaataagaatcttttttcttgttgcctttcttctatatttctacgttctttgttttcaaaataggcagtaagttcttttagtgattttggatgaaaagaattgctttggctttcttctatcataaaggcaaatttttctgttccgtctagctgtaaaacaaatataacatcatccttgaatgatggatgaagcatataagattgttctttgaaagaaatcactaaggaattattggcagaaatatattgccatgtagcatttataacactaccatttacagaagtaatgagagaaccgttttcttgaaagatatataactccttatctccagaatcattaaataccaaccaagacttattacatagaatagccttaacatccagattcttactgaatctgtggtatttgttaggaatatccaataagtaggctttcatcttgtttaaatccatgcttcccagtttccagacagaagcggataaaaataaggcgtggaaactttaacttattattccacttaggctctggactgccttgactgtataataagcaaagtccacgcctaatgatatgatattcctatagctaggatataaaataccatagacgcggacgcttcttgctcattacccacagtcaagaattgtccagattcaagtgaaggataactttgctaaacgccctttactaaaatatgtccttccagtgtcttaacgcattaagacctctgaaattgctgcaaagttaatgaaaggttttgaatagctaaagataaaacgctgataaatgcagttccaagtgttccaaaacatatctgtaatagataattagctagtatcagtttcttttagttgtaacttcattgcagtataaaaattagaagtgggcatataagacggaactcatacttactgttagctagaaagattatagctaatattgcagattgatataaccattcaaactttattagtagttcccacaaatcgcacataccataaactacaagccgtaccatgcctttttaaaaagacggttcccacttcatttcggaactggtttgcataggactatcagaatgtgacaaaactttctatctctgtaaatagctcagaaatttcaaactttgtcacattccaacagattagaaacttaggcagtcataagtatttaacagttcttcctgccttaaacctaagtatcttttagttatagttacactggaatgattaaacagttccatcagtttgactaaggctagttctgaattgtcactgttcatattataaacttgtctgccaaaagtctttctaagtgaatgacagctaaagttcttaatctttaatttatacttctttttcacctcttttagtatcacattgattctctggatagtgaaaacagttcctttttggctcactaaaataggtgagttaattcctataggctttatctgttcatagcattctttaatgtgctgcccaagttgggcatttatcctaatagttctcaccttatttgtctttttctctattactgtaaattcactggtatttaatatctgtttccatctcaaagctaaaatatctgatattctcaatcctgtgaaacaacccaaagctataagaagtgaaattttgtaattaccatctttagccaatttccttattaaattcatagcatcagaccaaactagataatctgctgtagtgcttgaatactttaaactcataatgttctgttttatatgtaaataaataaaagtgaatgtttcaccattaccaacatactagctaattagctaatgtgttgatttatagcaaaacattcactttgtatattagtgagtatttatgattgcagataagtaaagattgcaataatcagtatcagcaaaaaaggattgataataccaattattattagtagtagaactaccaatgtaccccatagtactagttttccattatcttccattctgtagtatttttaagttgttaaaaaagaaaggacacctaataaatagatgtcctctcattaattagtcaataaaccatttgtaatgctcatccccatgcaaggctgcattaattccaactgccatttcagtagcatttaaagagcggtctaagaaactatcaatatatgaacttttatttgctccagtgagcaaattataaaatttccacatattcaagtcatttccaaagctgccaaagttctcatcattaatgtaggcttttgcaacactgttaatctgtgtatcagttaataacattcttggcagtctcttttggtaaccattgggcaaacactgataaagtctcattttacccaatatttgtgcaaattgatgctcactcatggaagtattgcccaactgttgcatcagatacagatgtttggcaggattgtagttgttgaacaactctaaggcagaacggtaaagttcacttgtattgctcactcttaaatcatccttgtaaccatctgtaaatatgcacatattgcaacaaacttggtttttaaagcctattgccaacctaaacaactctggaactttctttgaatacagattcatttggttataggctctaacccctactattgaaaggttcaacttgttaccctcaaccgtttcatagattgtaggaatgtcaatactgaaagctgccctctcataatagatagttttgtcagattctaacaactgattggctggcttatgtatcgcttccggaatgcgccccttaatcacatgactaacacgaatattgggtgttccaatagcctcaccattgtagtaggagtttgcagcttcccaaacagtttcaataaatgcagcatggtttactgtaagctcattgtctttggcaaacactggagtaatgcagtcatttttcaagtgacttaaagaaacttcttgtgtgtttgcctctatgaaatgtaaagacttgttagatattgcagtttcttcaataatggttgcttcttctgcaaactcacctaaattcattctctctctgttctctgttggcatgataactaaattattcatattgataaaagtttaaatgattaataattctttttatatcaatatacagaggggggactaaggggcacgtagtccgtaaaggcaggcactcttatatatttaaggttactggctgaatggggagggggctttctgtactaagtactttatatatctgctctcttgacttttagctaaactgaatataggtgattagctagtttagtcaagcatgatgatgggtggccactctatttcttccttcttctttttattttttatattcagcactttagctatatattccaaagttatttcttcggaagttattctattagttagcaaactcctaatttcttcatctttcatataacctagctttcctgctatttcaagaagtaagctgttttttcttctgacactgccatcttccattatttttatttcatcgtttctgtctggtggaacaacatcgttatcaatgcaccagtcataaataatatgatagattcttgtatctgtatcatctttcttaaaatctggaataatggacttgttcaatatcagcaaaccattagttatacctcaaatccgcaactacgcgcctaatatgatacagaagcgaaaagaatctgcatcgttagtaaaaagggggcacagtgcatcgaatgtcaccataaagacatataaatgccccttaccccaccatgcgacttgaggcaatacgcaaaatcacgactataagttgtcggtgttatccaaagtcattctggaacacattggcataagcattgttgcatgaatagatattcagcacatacttccttgatgtcctgacccatttggctggcacagagatgaacttaaagacaaacgtcttgatgcggcttgttgctttgagtccgaacctcttcacgtcaagcctcgccatgatgaatttatagaagttgcgtatgagtgccataagcagaagaaacaccgtgttttctcccataaaggattttggaagcctgttccagccgaatccgttattcatatcatcgaagatgcgttccttccctccacggaggttatagaattcgacaatctctttctcggaagactcgtagtcatttgtaaggatgcagcggtaggtgtattctccttcccacaggtcgagttcgccgtctatccgcttctgtctttgaatcacaagacggtatgccttccctttccatttctcgatgagaatggaggccagctcaaactcaatgccgcccaattccactttcttccaacctctgagggcaaagatgtcattgtagagcgaactgcatcggttagcacggatatagaaggtcttgcagtgtttagcaatctcttccactatctcttcagaacacgagccgcaatcagctctgaaacggttgataataagcttgttttgttcaaacctttcaaagaacctcttcagcgtgtccttctggtggaaacggacatttgtgttgccgtcgctgttctcaatgccgacaatcaagttgccaataaccgccacgccagggcgataaccaaggaacttcttgtatgtaggcttcgcatcaaacttctcagcctctatgaactggtggtcgaagtcaacgtcatacccctcgccctctttcagctgccctgtggacaataggcaattgaggagcagtgtattcagcttgtctgccgtgttgaagtcgtaggtcttgccagtgtcggatgtgtaggaaatgttatcctgggtcagttcctttatggctctaagaatcgtgtcggcactgcatgtgcgaagtgtcggatgaagcgaaaggtggtacatcagatgagtggtgacatcctcgatgcatgagccgccacaaaaataaacgctcataagcgaacggatgatttcgctgtattgataaccatacagcctgcatctcataccgagggttgagtcgattacagatgagagtctggagtcaaattgctccattattgaaaatattcctccaaaaggagtgagtttctcggatttaattgctacctttgccatgtctgtcgggtttgatacatattttgatttgcaacactaagataggtgaaaaatctgacatggcaaattcctgagcaactttttgttgctcaggtacttaaaaagttatatttgtaatagtgttgcggaattaaggttatatattttatctgtcctgcattgactgccatttccagatatttatttaatgtctttgtatcaataatgcccagtttcttagacagttccgctttgttaagcccatccagatacggactttcacttatatacttgttcgtttcctttttgcatattgcctttaatttaagcaagaagttctttatcttaattctctcactggcttttgcaatgttcatatcatcattaaagaaactgttataaatataaaagaagtcttcattacattttgccacatgatatttattgtacgtcttgtagcttccttctgctattacattgttacttatcactttatcaataagattcttattattctttagccttgaaacgcttctttttacagtgcttaatgatatgcctagtttttcggaaatctccttttccgtaacattatctgcaatggaagttttataattcatccttgactttatataggcatatactatggcatccttattatctacattattaatgtcttttgtcagtgtcgtatattgttgttccattgtgcgcaaacggttggttatttgattcttcttgatatatgttataaatctctccgtttttcagagccttgttgtatttacgtgttccacctagataccgtttcaattcctttctggtattgaacagtctgttgttgtatatcatcataatgttacgtttttgttattagttacttatctacgaaagctagaaatttgataatgaagtgcgaagcactgaattatctaagttgtaatgttagtattgtagtaatgtatagagtatcatttttcccctatacttggtgtcaaatttcccatagactacggttcatttttccttagtaccacttcactaagattatctttaaaaaacatctgtaatttactttcttgtgttatctggctaaccatgtatgccgaaataggtattatgtaccgtttttgatgctgccttacagaaaggctttgcagtcatacattatgaggttgccaatcatccagtttaaagtagaatgtaattctacgcttgtttatctgcttctttttctttagaaagccgttcatctttgcccatataccaacagctaccttattgccggtaatgccatccttgaaagccatttcttttaattgttcaaacgtgtaatactccatgattcaatgttagtttcattatatactgtaaaatctatagtgcttgaattactctgggcagttctggttatgcctctgctcgtggtaattccaatctttttatctatgtacgattatactcacctctgggcagtgtacctaatcaaaggggcactttctatagccagcttacctttatctccatattgccgttattttcttctgtcaataagctaacagacaagaatagtgactttatgtagttcttttgacaatagtttatatttatggctatttacggatatgtgatattcggaatagatagttaaacaactgtatattagcgactagcggatatatcgaagtaggtgctatataacttgcctagtagatgaaaaacggcaataaaaaaaggcagtcagttatcctgctgcccttgtgaaccagtggaatactgattcaaacaatataatgcaaaaagccagtcaaattaatattaaactggctttcttatttcattgtgtctaatctattccgacacaagttctaatgaacttcgtttcttcttttctgttttcaagtagcagtaccttgagcttttctggaactttagcccactcttcctctgtatcttcttcttcaacgtccatagttctttttattgtcacatcaaaagaatcatttcctctcttttcaataaatataaatatctccgcatctatatttatcacactagtgtcatatctgaacagcctttcaattattccggcatcattggtttcttgataaaatactcccaccactccctctttctgttccatctctatatccgttttcagaacatcttctgtaaaagtcaaaccaagcattccatagtgtatcaatttggaagcgaagtttgcgccataatgtaagtaaccaactttacatacatctttctttaattcaatgatacaacctcttgtactcataattcaaaatgtttaaagttattattaactatatcttgcataaaatctctatccagaggaacaccgcaaggctcaaaaacgcttcctgcctttggcatttcgtatgattcatttattagttttgcatctttaagaccttgcaatgactgaatggtaaacccacgacagcacactctcattgaaaagtattcatttaccacttctgcattttgcttggtttgtgcccaagccaacatctttgccaacatatactcattaaagtttatgccatacttctccaaaaaagtaaatagctttgtaaattcattctttcccatatttatatttatttgattaattatagttctcttccatgtgttttttccaaagaatgttcagttcttcataaatgatagtttcctttggttttccacctcttgtacctttagctttttctatcttctccgtattttcacgttgaacattagctagaaagtggttcatattgttagtgaacgtacttttttcgctatcatccgtatcttcatacttgccaataatccagtcaatgagtgtacggctcttcaaaaactccgcactgaatgattttctggcggcttcaacaagtgttctccctctactgatggtgtttgattttctaagcacttcatcaatattgccgctgatagccctgacaagaactgccttgcttatcttactgccaaatgtagcccacttggaagccgcatccagagaatagcccatagtagtcaaatcagacacaaagtccaatgtcggcaaatcctcttcaaccatcattttcacaccctttacataatccgcacctttccatggggtagtggcaatgttgatttccgccaatgtcttttcaatgctaacagacggattcaaagaatacatgaaatagaactctctttcgtactgcttttccggctcaatctttttattctcttccagaagtcttaaatgggcactgtaacggtggttggcatccaatagaacaacatagttatttccatccttgatttcttcaccagtggtaaaatcaaccactttcaaaccgtctttaattgcagtggaagcgtccacaatgattgcaggaactagctgaccgtattccctcattgatttcattttagccttgactgccttttcattcaaatctctgttacctgccaatcttgctacttttacaccattcttagttaattctgttaatgtcataatttcgtttctcataatttattaccgctgccctgcggatttatattggcttctggcacgccgttattatttttttgatgatgcaaaagtagagtggaaattcccatagacaaagcattttgcctaatgcccatgtgtgtagaaaacgtgcccattccagtacgcaaaaaaaatgcgtaccaaaaagggaaatcctttcagtacgcattcctgctatggttgtatgtatgtcgtttatgagactaccatgtagttattagctatgacagacggaaatttctcgttcttgtatcttctaaggagattggataacattctgttcttgttgccctccgaatcgtattcttcattatatctcttgccatcatagcccactgtatagataagccttgaaacaagcatcatcttgtctttagatacctttacccttttattgggtatggtggtagcctttcttctttcaataaagaacagaaacatatccgtaaacttccatttcttataagatatgtcaagactgaacttgtccgtaaagctgatttttgacgataagtcatttctgataaatccacccaaacctatgttctttaattgtttaatcatggtttctctgtcttgttcactatgtataatatcactgtatgtattgataaaatgctgcaaggctgcttgaatgattctaattgtgtcctctctttcaacaacatagcttttcttgttgttcttctttaaggtgatacttgtagcttccaatagattggcatgaaaatagctaaaatcttctaatacggacttatttaatgcaggtgcgtttgtaccaatatcctctataaagtcatatacgaacagaagtagataccaaaacttgctaacatctagcttatatgcttcaatggtattctgtaaatcttcattagttagaaacttctctttgaaagaatcatccagatttctgtattcccgttttttgtattcttccaaagttcctttgaaagtgttcatttctttgtttctctcgtatctttcttcaacggacaagtttctttccgcatatctgttggcaaatatagcaggtgctgtagattctattggtatcattcccttatctgtttcttcataatctggtagaaagtggttggctacttcccacacatattctaatagtggctcatccagacatttgtagctttcagtccaattaactttcaaatctgaaagttcctctatctgatatagtttttcttctagcatggtacattcattattagttctactgcaaaataacagaaaagtttgtagaatacagacttttatattttatattcttccagattgaaactttcctgcaactgtttaaatgtgtattctttctctttgatacgttccaagacaaaagaagtcattttaggttgctctggtaaagttggaactattacagtccgttttaccttgttgaatctgaaagttataggaagtgcccataaaaatggtttgttcctattatgatacgctatgatagtttccaagtcattcttgtaagtaatgactatgaatccgctatttaaagaaacggaataataaactactttactaagtaattctctgaacatttctcccttgccctccagagaaaggctgtcaagttcttttcttgactggctctttatttcatccgctattcttctgttattggatgcaatttcttcatcaatggctgtcttttccgcttctatactctttatctggctgtctattgaatccgccttgccattcaatgccttgactattgttatattggtggaagccataacattatctatgactgttttcaaatcagactgtagtttggctatttcagaatccttttcttttatgctttgtgtcagttttatattttcagcttctatttctgcaattttctcattgctcttggcttggtaagtttcatccagagttctaagtctgacatctttccacaccgcatatattaaagtttcagcctttatgccaacattggtgcatgggctttttattcccatctttattctgtcaagacatctgtaggtaatgcaggatgaggttctgccatacattgaggtttgcccacaaggacacttgataatgcctttcaacgggttataatgtttttgtgcctcaccgctataattcttgttctcctgcactttcttgtgtgccagattccagatttcatctgatatgaattttacgggaagttccagtttcatgcctttccaatatctgacaccgttataaatggaatcatttataattgttctgatagactgttcatagaacggtttgtttcttgctgtcctatatccaagcatattcagtttttctgctgtttttcctagagaaagaccgtttgccacatagttaaatatatctctgactaactgcatacgttcctcatcttccaccaataacattttgggggttgctccctttatataattcggattgggcactgccttaaagccagttggtatattactgtctgtaagcattaacggaaacgcttgtactttactgtctttacctgtagtcatacggcttactattttctttctttcatccgctgctccataggctttgattgcaagcattaaaaagtcagaaagaatgatagtttttccagcttcatataccttgtctggttcgtctagtattactaaatccacgtttctaatgattgtgtgaatctgtgtcaaagtttcaaatatatcatcttgacgtgacagtctagacaactcactaactactaccatgtcagcaacgctattggtaatgtttagaatactgttcaatccgtttctgttgctgactgttccagatatggcatagtcttcttctattcttaacagagagtaccccttattctcacaatactttctaatcaacaccctttgcctttcaaggtcttgattatcagtagaaacacgaatataacctataactcttttcattgtttatcttatctttgatgcaaagataaagagtattttcaatagcaaggtataactttaacaacttaacattctgccgcatcctgctgccacccgaactgcgcttcggatataccgacagtatcgacttcaaaagcaagcaggacgcagagcggagcctcggccgctttttcctgataaacatcgacgaattcgaccaaatcagcgtcaatcagcaaggttttctaaagcatctgctgcagaaacccgtggcaaacctgcgcaagccttacggcaccgccatccaggaaataagacgctacgcctcctttatagcaaccagcaaccagaaagacctgctgacagaccccagcggcagccgccgtttcatctgcatcgaagtcaccggccccatccataccaatgtcaccatcaactaccggcaactctacgcacaagccatggatgccatagccaaaggtgaacgctactggctggacgattccgacgaagccatcttgaaacagaccaaccgggagtttgaacagcccacaccgttggaacagctcttcctctgccacttccatcccgccgaaaatgaagaggaaggagactggatgacccctatggagattctctccttcttgcaaaccaagaccaaagaccggctgtccatcaataaagtggctctgttcggacgtgcactccacaaactgggcatcagcagccgccggaagacaagaggaacagaatatcatgtagtgaaaaaagaataatcctgccaattaatttgcttctactttcggtttgcgctatctttgcgtttcaaatcaagaagatatgaaaaaagaaagtcaagtgatattcgaccggaatgccgtagagtttgtgaccgtagccgccgagttttgcaagtttctggaacaagcggaaggggtgaaacgttccgcgttcgtcgatacctctttaaaaatacttccgctgctctacctgaaggcctccatgctgcccgagtgcgaaaccataggagacgaggcgccggaaacattcgtcaccgaagagacctatgaggtactccgcatgaacctcgccaatatcctggccgagaaagacgactacctggacgtattcgtatccgacatgaagtatagtgaccagcccatcaccaggaacatttccgaagacttggccgacatataccaggacatcaaggactttatcttcgtattccaactgggtttcaacgagacgatgaacgattcgcttgccatctgccaggaaaacttccgcctccattggggacagaagcttgtcaacaccctgcgtgccctacacgaggtgaagtatgcgcaaggcgaggatgaagaggaagaaaccgctgactttgaattttaaattatggttatcaaaagaacaatagataaagaaatcttgaaagacctgcccaaagccgcttttccgggacagatacatgtcgtacagacaccatgggaagcggaaaaggcagtcgcctatctgaagtcctgcccgttgctgggcatagacagcgaaacccgtccatcgttcacaaaaggacagatacacaaggtggccctgctacagatttcctcagaggaacattgctttctgttccgcctcaacctgacgggactgactctgccggttatcacattgctggaaaacccaagtgtaacgaaagtaggcctttccttgcgggatgacttcatgatgctgcacaagcgtgctcctttcgaacaacatgcgtgcattgaattgcaggaatacgtccgcgctttcggcatccaggataaaagcctgcaaaagatatatgccatcctcttcggggaaaagatttcgaaaagccagcgcctttccaactgggaagccgaaaccttgaccgaaccgcagaaactgtatgccgccaccgatgcctgggcatgcctcaacatctacaacaagctgcaagaactgaaacggacaggagattttgagatagaagccaataataatgtggtaatgtaatgcacattatcacattaccacattaatcacattatatatatgtacaaagtataccttaaacccaataaagaggagtcattaaagcgttttcacccgtgggtgttttccggcgccatcgcacatttcgacggagagcccgaagaaggggaagttgttgaaatctacacgtccaaaaaggaattcatagccaaagggcattttcagattggcagtatcgccgtacgcgtactgaccttccgtcaagaagaagaaatcaatgcggacttctggaaacgcaaactcagcatagcatacgacatgcgccgcagtatcggcatagccggaaacccgacaaacaacacctatcgcctggtgcacggggagggagacaacctgccggggctggttatcgacatttatgcccgtaccgcagtgatgcaggcacattctgccggcatgcacctcgaccgcatggccattgccgatgcccttaccgaagtgatgggcagccagattgacaatatctattacaaatcggagacgacccttcccttcaaggccgacctctatccggagaatggtttcttgaaaggcggcagcacggacaatgtagccatggagtacggcctgaagttccacatcgactggctgaaaggccaaaaaaccggtttcttcgtagaccaacgcgagaaccgttcgctactggaacgctatgccaaaggccgcagcgtactgaatatgttctgctataccggcggcttctccgtatatgctatgcgtggagacgccaaactggtgcattccgtggacagctccgccaaagccatcgacttgaccaacaagaacatcgaactgaacttcccgggtgacacccgccatgccgcctatgcagaagatgccttcaaataccttgaccgcatgggcgaccaatacgacctgatagttcttgaccctcctgcttttgccaagcaccgcgatgctctgcgcaatgccctgcaaggctaccgcaaactcaatgtcaaggctttcgaaaaaatcaagcccggaggtattcttttcactttctcgtgctcgcaagccgtcagcaaagaaaacttccgcaccgccgtgttcacagccgctgccatgtccggccgcagcgtacgcatcctgcaccaactgacgcaacctgccgaccacccggtcagcatctatcatccggaaggggaatacctgaaaggactggttctatatgtagaataaaggaaaaagcaggctttgttagcctgcttttcttaaatagagttaataaaaagcagaaatacgccaaaacagcatgttatataacataaaccgtgtatatttgcactgtgtttttcatggtattagatttaaggttaataaagattgggtgtctgggatagatacccttctttttttataatacattccttcccaaaacccatccctcattaatctctttcgttgaagaaaaagccgtacagaacttgtttttctcctagtctcattgtacatttgcatctattacataattcaaaacataaaaagctaatattatgagcatcaaattccgactcactgccatgcaattcctgcaattcttcgtttggggagcatggctgatttcattaggtggttacatgggcggtacgttacattttgaaggcggacaaatcggagcaatctttgcaaccatgggtatagcctcactgataatgcccggactgaccggtatcatcgccgacaaatggataaacgccgaacgcctttatggcatactccacctcatcggtgccggtgctctgatttatgcttcaactgccaccacatacaaccacatgtactgggccatgctgctcaacatgcttgtttacatgcctacactatctctggccaacaccgtatcctacaatgcattggaaaaatataagatggatttgataaaagacttccctcccatccgtgtatggggaacggtaggctttatctgtgccatgtgggctgtggacctcaccgggttcaaggcaagttcggcacagctctatgtggcagccatatcggcagccatgctgggactttatgctttcactttgccagcctgcccccccatgcgcagcgaaggaaaaacgatgctctccgctttcggactggacgcactggtgctgttcaagcgcaagaagatggctatcttcttcttgttctccatgctgctgggagccgcccttcaaataacaaacacatacggcgaccttttcctgggttcgtttgcttccatacccgaatatgcagattcgttcggtgtaaaacactccgtcatcctgctctccatctcgcaaatgagtgagacgctgtttatccttgccatccccttcttcctgaaacatttcggaatcaagcgtgttatgttaataagtatgtttgcatgggtattccgtttcgggctctttgccctcggagacccgggaagcggactctggatgctcattctctcgatgattgtctacggcatggcatttgactttttcaatgtatcgggctcgctgtttacagaaatggaggcacatcccagtatccgtgccagcgcacaaggcttgttcttcatgatgacgaacggtgtgggagccatcatcggaggttatgccagcggagccgtggtggatgccttctcggtatatgccgaaggcggaggactggtaagccgcgactggacaccggtatggtttatctttgcaggatatgctttagtcattggtctgctatttggaatggtgttccgctataaacataatccggaaaaaatagagaaaaactgattgagagtcaggttgatttaataggtatgaataagaaaaagatagaactacaagtactaaacatttccaacagccaggcgcaagcgggtgcctatgccttggtactgggtgaagtgggtggcgaacgccagcttccgattattataggtgccaccgaagcacaagctatggtcatcgagatgaaaggtattgtaccgccccgtccgctgacccataacctatttgcttccgttcttgaggtgctgggtgtaaaactgatgcgtattcttatctataaagtagacaacggagtattctactcctacctttacatgaaagccgaagagactattctccggattgatgcccgtaccagcgatgccgtcgccctggcattgcgcatgaatgctcctatctttgtctacgaagagattctcgaaacagaatgtctgaaaaccggcgaaagcaccaccgaccctatgggaggcagcgagccggacaaagacgaactgttgcaggaagacacaataggcatattgaaaacagccctgcagaaagcaatcgaagaagaggattacgaacgagccgcacagataagagaccaaatcaaccaactcaaaaacaatttgtaacatgcacgtattctatactcccgacatacagacccacgcagaactgcccgaagaggaagcagcacatgccgtacgggtcttacgcctgcaagcaggcgacgaggttatgctgacagacggaaagggctgcttctatcgcgccgaaatcagtacggctaccaacaaacgctgcctggtgaatattctggaaacccttccgcaagcccccttgtggaaaggtcatctgcacattgccatggcacctaccaagaacatggaccgtacagagtggtttgccgagaaagcgacggaaatagggtttgatgaactgacattcctgaactgccgtttctcggaacggaaagtcatcaagacggagcgcatctccaaaattctggtttccgccatcaagcagtcgctcaaggcacgcctgccccaactgaatgaaatgacagacttcaacaagttcatcacacagccttttccgggtcagaaattcatcgcacactgttatgaaggtgagaaacagcttttgaaagacatcgtacatcccggagaagatgcgctggtattaatcgggcccgaaggagacttcagcgaagaggaagtccggaaggcgacggaaaacggttttatccccatcagcttgggaaaatcaaggttgcgtacagagacggcggcactggttgcctgccacatcctcaatttacagaatcaatgatactcactaaaacaaaaactatatgaaaaagaacctattcttccacttctcagtactggcaatgctcatcgtgctgataagcgcttgttcgtccaaaaagccagaatacaccaacgttattccttccgatgcctcgcaagtcatcgctgtcaatttaaaatcattggcagacaaggccggtaccaaagataaagagactaaagaagcactgcaaaagctgacagatgccttgaaaagcgatatgaatgcagctactttccaacaattggaggctgtactgaaagaccctgccaaatcgggagtggacgtcaatgcgccgatttatgtcttcaacgctccctcgttcccctacaccaccatggtagccaaggttcaaagtgaggatgatttgctgaagcttctggaagttacggagaaagaacagataatcagccatgtggcagaagcggacggttacagttttgcacaaatcaacaagtgggcattgctcgctttcactcctaccacgcttatggtggtgaactacaccggcacatcacaactggaaaaagtcaaagaaggaattcccgccttgctgaaacagaccggagaaaacagcatcaacagtaacaccgctttcaagaaaatgcaaaagcaggatggagacatcaatatgctcatctctccttccagcctgctgagtgcatacgccaatccgctgaattacggaatatcccacaatatcgacctgaaagacttgaagatgctgggaagtctctccttcgaaaaagggaaaatagaactgaaagtagagagctataccgagaacacagaattgaaagcacttttcgaaaagcaaatcaaaagtacttgtcccatcgaaaacacgttcttgaagtatttcccaaaatctaccctggcgctattcagcataggtatcaatggagaagagttctacaatgtgctgcaagagaatgagcagttccgcaacgatttctccattaccaaagccgctgaagtaaaagacttgttcagtgctttccacaacgacctgaccataggccttatcaatgtaaccatgaacagcaatccttctttcctggcctatgccagcgtaaagaacgacgctcccttgaaagtcctttatgagaaaaagtccgaactgggactgaaacgcggcgaagacatcgtgaaattgaatgagaatgaatatgtctataaatcacgcgctatcaacatattcttcggcatacgagacaaacagatgtacgccaccaatgacgaactgctgtataagaatgcatgcaagaccgctgacccgtctgccaaagagacggacttcgcttccagtctgaaaggcaagcgcacagcctttgtcatcaatgcggaagccgtacttgacctgcccgttgtaaaaatgctagctggatttggcggacaagagtatagcacctattactcgctgctcggcaatatctcgtatctggaagctgtcggcaacgaggacaaggcaaccgtcaccctgcagctgaagaacaagaatgttaatgcactgaaacagattgtggactttatcaagcagtttgcaggaatgtaatttaaggattaaggattagagattaaggattaataccactcatgaataggattcacctacggcaaacactacctcaagtgtttgccgaccgtgatgccattacctcagacgtatggcatcgggacattacgttccacaaagggaaacgttatctcatagaagccgcttcgggcaccggaaaatcatcgctttgcagctatgtttacggctaccgcaacgattatcagggaatcatcaactttgatgagcgcaatatccgttcactctccgtcaatgactggacagatatacgcaaacactccctcagcattctttttcaggagttgcgtatctttcccgaacttaccgccatcgaaaacatacaactgaagaaccggcttaccaacttcaaaaaaaggaaagaagtccttaccctattcgaggcaatcggcattgccgacaaggtaaacgagaaagccgggaagctatctttcggccagcaacaaagagtcgcctttatccgcagcctctgccagcctttcgacttcatctttctggacgaacccgtcagccatctggatgacgagaacggaacaatcatgggcaggctgctgacagaagaagccagccgccaaggagcgggaatcatagtgacttccatcggcaaacatctggaattggattatgatgaaatttatcaattataaatgtggctaatatgaaccgacttgtttggaaacttctccgccagcacatcagtgtcggacagttggcaggctttttcctcgccaatctcttcggcatgatgattgtattgctgagcgtacaattctatcgtgatgtccttcccgtttttacggaaggggacagtttcatgaagaaggattatatcattgctaccaagaaaatcagtactttgggcagctttgccgggaaaagcaataccttctccaaagatgaaataaaagacctgaaagcccaacctttcaccaaaggggtaggcgcgttcactccttccttgttcaaagtctctgccggactcggtatgcaggaagccggtatccgcttgtcgacagagatgtttttcgagtctgtacccgacgaatatgtggatgtcagtctggacaaatggcattttgatgaagatacccggataattcccatcatcgttccgcgcaattatctgaacctctataactttggctttgcacaaagccggagtctgccgaaactctccgaaggtttgatgagtctggtacagatggatatcatgatgcggggcaacggacgtgtggaacaatataaaggcaacattgtaggattctccaaccggctgaataccattctcgtcccccaatccttcatggactgggccaacaagaattttgcaccggaaaaagaagctgaaccgtcccgacttattgtggaagtgaagaatcctaccgacacagccatcaccgactatttccagcaaaagaattacgaaaccgaaggcaacaatctggatgccggaaagacaacttatttcctgcgcctcattacggctatcgtcatgggcgtaggattattcatcagcattctgtcattctacatcttgatgctgagcatcttcctgcttctccagaagaatacggtaaaactggaaaacctgctgctgataggatatagcccgacgcgggtagccacgccttattatatactgacagtagggctgaatgtactggtactgttcctctccatcggttgtgtgatatgggtacgcagttactatatagaagtagtcaggaatctcttcccgcaattggaaagcgggtcactgcttccatgtatattgaccggttgcctattattttttgctgtatcactgctgaatattttggcaataggcaaaaaaattatcagtatctggaaagggggaaaataaagatgggaaaaatccatccaacagatataaagttcatggtattgttggtattatgcctcagcatggcatttcccagctctgccaataactttctattcactaccattgacacctcgcacggtctgagtgataaccagatacgctatatcctccaacttccggacggaagaatggtatttaccaccacccggaacgtcaatctgtatgatggagccaacttcacctccctgcagcccacccccgaagatatatatccgctgaaacaatacaagggcttctaccatgtctatctgagcggcgattccctcttgtggataaaggattaccaacggctgatgtgcatcaatctccataacgagcgatacattgccaacctggactccgtctttcaacagaaaggcatgcagcatcccatagaggatttgtttgcggacgaacgggggcttgtctgggtaatcagccatggcgagctgttacagccggaactttccttccgattgaaactgcctgaagaccggggaacgatacaagaccagactgcagatgacgaatcgctgtatctgttccatgacacaggagaaatcgtatgctatgatgtaaaaaacggaaagcaacagtatgacattgccgcatatccccggacggaacaagagaagttccaaaacacctccctcatactcagaggaaaaaacgggttctatcaactgcgcaacggctctaaaggaggatttttccatttcgacctccataagcgagcatgggagaagctgatggaaacagactataccctcaatacactgatgatttccgcggatgagaaagcatacatcagctgcatccgtggtttttggattatcgaccctaaaaaggggacacgccactatatgcccaccttgaggacccgaaagggcaacgtccttgccacagaaatcagtacgattttccaagaccaacaaggggctttatggctcggaacattcaacagaggattgctgtactaccatccggccctatataagcacatccacatagacaagaaggatttccccctatcacttgaaagaaatacagccgtagcaaactttacggaagaccgggacggcaacatattcataaaggaccggacagctatctataagctcgacctgcaggaagacggcaaccggatactcatgccggtagaagcatccaccctgcccaaagagctacaaggggaatacggttcggaagcggcattcgtgtcacatgacggaacgctctacttcggagacgctgacggatgcaatatcttttctcccaatccggagcctccatcttccagtctgccctatccaccggttttcacggcaatccatgtacatggagaacgcatcctcccgggcagaagctatgaaagccggactatactacccgaaaactctccttatgtggaagaaatatcattgaaccacgaccagaacttcctcactctcgagttctccgcattgaattacttcaaccgcgagcacacccattaccgctatcagctggaaggtatcgacgcacaatgggtaaccgccggcaacatgaagcagagcaacggcattctccaagctccctataccaacttgccaccgggaagctacaccttcaaggtaatggcctctaacgatggaaagcattggaatgaagagcaaacggcccggataagcctaacagtccatgctccctggtggaaaaccggcgttgcatacgtcatctatatagtcttgtcaatcgccatcattgcggcaagcatccgcctctacatacaccgcacccggaaggagatggaacggaaacacaaagaagaaatccttttgctccgcatccgcaacttgatagagcagtgcaaccgttatgaagcggaacaaaagaaatcactggaaggaaaaaacataacttgtgtacatagccataccgaacctcaccaaacagaaaacaagcaagacgcatccgaatctgttttcctgacaaaagctatcgaactggtggaaaagaacctgcatgtacccggctactccgtagagcagctaagccgcgacttgtgtatggaacgcaccggactttaccggaaactggtagccatgctcgaccagtcccccagcctcttcatccgcaacatccgcttgcaacgtgcggcacaactcatcctggaaggcagcctcagcattacggaaatcgcagagcgtaccggcttcagcagttccagctatctcagcaaatgtttccaggaaatgtacggctgccgtccctcggaatatgcggagaaaatgcagaaatcaacttgagtgttgttccgtttcaacaagattgttgccacctaaaggggattcaaggctacttttgcagcataattttaaaagaaccatgaaaatgaattttatgaaaagagccggcttcgtgctgacttgtgcaaccatgcttgcaaacttgtgtgccgcccagaacacagagcgcacacctcaaggaatgaaatgcaccacacaaggaatggacatccgtgtggaattctattcgccttccattgtgcgggtttacaaaactcccgaaggcaaaccctacaacaaagaaagtctggtagtggtcaaatcacccgaaacggtcaaagtggacttttcggaggaagcaggacaaaccgtgctgaaatcttccatattgaaaatttttgtcaatccggcaaccggaggcatcagtttccataccatcgccggcaatgagctgctgaaagacaaggactacggcacctcttttgccgataagaatgatgccggcactccctcctatcaagtaaggggctctttcctattggataaaaacgaacctatctacggagtaggacaagtgatggacggcaaattcaaccgccgcaactccatgcaccacatgcagaacgagaacatgttcacctattctccttatttcatgtcgcctgtgaaaggctatgccgtatattgggacaactactccatttcagaattcatggatactccgcaggaactcgctttccagagcctgggacactgtgcggactattatttcatgtatggcggaaacgccgacggcatcatcgcccaggtgcgcgacttgacgggacactcccccatgcttccgttgtgggcctatggtttcttccaaagcaaggagcgctatcatacgcaggaagaaagcctgaatgtcttgaagaagtatcgcgaactacaaattcccattgactgtatgattcaagactggcgctactggcccgaatatcagaagacggacagtgcgtggaactcacacagctttgaccctgaacgctttcccaaccccaagaagtgggccgacgaaatacacaagctgaatgccaagctgatgattgtggcatggcccggctttggcacccacacagagcaacgcaaggagctggatgccaaaggcatgattatcaattttgatacctggcctccacaaagtggcgcacgcccctacgacgtctacaatcccgaagcaagggatatttattggaaatatctgaataaaggcattttcagttacatcggcaacgacggctggtggctcgattctacagagcccgaccatatcaaccgacaagaatcggactatgacctccccactcacttgggatcttaccgaagtgtaaagaacacctactcactgatgcacaacagcggaatagcctcgcatcaaaaggctttgagcaaagacaaacgcgttgtcatcctaacccgttccggatttatcggacaacaacgttacggctgcaacacctggagtggtgacgtgacctccacttgggacatgctggagaaacagattcctgccgcactgaactacaccttaatgggcattccgaactggaacagtgacataggcggcttctttgccggacgctggaaccaagaagggggagccaagaaccccaaataccaagaactgtatgtacgctggatgcagttcggcactttctgcccgatgatgcgttcgcacggtacggagttgccccgtgaaatctggaacttcggcaagcgtggcgagtggtgtttcgatgcccaggagaagatgattaatctgcgctatcgccttctgccctacatttacagcacttcctgggatgtgtcccacaatgacggtacattcatgcgtcctttagtaatggattttgcagcagattctaaaacacatgaagttggcggcgaatttcttttcggacgctccctactggtagcaccggtcacccggccggaagtgacggaatggtcggtttaccttcctcaaggcgcagactggtgggacttctggagtaacgaaaaacagcagggcggacagaccttgaaccgctgtgtatcgaaagagattctgcccgtctatgtaaaagccggcagtatcctgccgttcggtcccaaagtacagtattccgccgaaaagaattgggacaatctggagatacgcatctatccgggtgccgacggcacattcaccctctacgaggacgaaaatgacaactacaactacgaaaagggagcttattccaccatccgcttccattgggacgacaaggctcgtcgcctgacaatagaagagcgggaaggcagttttccgggtatgctgaaaagccgcaagttcaaggttgttctggtcggtcagaactccggtacgggagaccggccgatgaaaggcggaaagacaataagctatgcaggaaagaaaaaaagtataaagctgtaacagtaaaaaggaggaacgtgtcaaaactaccttactattttttaggcgcggattacgcagatttcaagaattcaatttgcatagtccgcgttattccacgtaatccgcgcctaatattacagcataatgaagtggtcatatactttattaaaaaggaaacagcaacggcaacacaaataccatcaccactcccataataatctgcaacgggagccccacttttatataatccatgaatgtatattgtcctgccggcatcaccagtgcattgggcggtgtagagaacggagaagcgaaacacatgcttgccgcaaccgtcacggcaaacaagaacggaacgggacttactccaatctgaatcgcactttgaagagcaataggggccatcagcactgccgtcaccgtattgctgatgaacatggtcatcaatgaagtggtgaaatagatacctgccatcaacacaataggaccataactgcccaatccgctcacaagactgttggatatatattccgaggcaccggttttttcgagtgcaagagacatggggagcatggctgcaaagagtacaattgtttcccagtttatcgttttataggcggcttccacattcctgaaacatcccgtcagcaccatcagcaagccggcaatcatcaccgctgtcaccggggccacgggaataaagtcgaagaccatcatggcaaccatcagcaccatgatagcggcagctatgggcgctttataatccagcgtcactttggcggcttctgccaaaggctgccccaataccacccaatcggaatcttccctgcttatccgtgcgatgtcctgccacgcaccctgcaccagcaaaacatcgccactatgcatacgctcacgtcccaattcacgtaatatatattccttcttacgacggatgcccaatacatttacattaaatttatcacggaaccctgcttccttcaccgtccggttcacgatattggaagaaggcatcaacacgatttcggcaattccaatatcataaaagtcaagggacttgtcggctttggaggcttcttcagtggtatgcccgtcgagcatttccattaaaaagtcttcagcaaaacgatttacgttcgatacctctcccgtaatataaagcacgtcgcccacccaaatagtcgtatcgggtgatgccaatttctgggtaatagttttcaggaatctatgttgggaagagtctacacgccgtacttcaataatattcagaccatacttgcggcgtacatccaggtctatgatggtttttcctatcagacgggagtcattgacagccctcaaacggaacaggttgctggaaagtccgtactcctgtaccagttggtccaatgatttacccgacaatgttccgtcattctttttgcctttcttggagagaaaccatttggtcagaggcattaaaaccaaagttcccactatcacgcacacaatgcccaccggcaagaaggagaagaaagacagcggttcaaagcccgctcccgtcaatgtattctgaatgaccaagttaggaggcgtaccgataagtgtcatcataccgcccatgctgctggcaaaagccaaaggcatcaatagacggctaggattcattccggcactcagtgccaagctcaccacgataggcagcatcaaagccaccgttcccgtattgctcacaaaagcaccaatggcagaggtaaccagcataaccagcaagaagagtttcagctcgcttttgcctgccagctttaaaatgcgcgaacttatcattttagccagcccggtctgaaaaatggcgccgcccacaacgaacaagcccaccatcataatcaccaccgagttggagaagccggaaagggcctcttcaggagtaagaatctgaaatatcaataaaccaatcagcgcacaaagcgccacaatgtccgaacggactttgcctgctacaaaaaaggcagcggagagaacaaggataataagggtaatcagcataaatatgtatattaagaatgcacaaatatacttatttacgcatgatcacacaaccccttactacctcaaattactgattcagaactcgaatttttccaacttcatggcagccagcccctggattttgggcaccagggccacaaaatggtctgctttttcatgggcagacaatgactctgcatctttccatgtttcacaaatcataagaacatcgctgcgagtggcgctctcaaacacatcataagcaatgcatccattgtccttcaaggaatatgcgaccagttctttggcagattccaatactgcggcacggttctccgcacttacctgaataaaaacatttaatctaatcatacttgtataaattttaagtgcatcgcaaatttaagcagaataaatatctccaccaacaaaagtaaattgttattaattcctttcccgccggatgaaccaatctttggcaagtatgttgtctcatcagaattgattctaactttaactattaaaaactgacttgattatgaaatgtaaagattctaatttctggatcggactgggaataggttcggttgccggtgcattggcctaccacttctcccgtacggagaaagctaaaaagctggaagatgccatatgccgtgccatccacaaagcaaatggcgaagccaaggagttcatcaacactgctgaagaagaagcattgcacgttggcaccaaagtagcagacaagatggcccatgaggcccatgaggccgcagagaaagctgacaatctgaaaaacaaggttcacaattttgccgatgctaagaaataaaacaagcacttggaaacttctgaaggggtgtgtcgaaactggtattcaccacagattacacggattaacacagaatgagcttaatctactgataatcaaagatgcttatctgtgcaaatctgtgtaatctgtggtgaataccagtttcgacacaccctctttgcatatcgacccatcagttctgcagactgcgccgattcaaaatatcattcatatgctccaatgcccatcctaccaaagattcaatatgcggcatcaggctacatccggtttctgtaaggttatactccacacggggaggaacttccgcatagactttcctgacaatcagcccgtccgtctccaatgagcgcaatgtaaccgtcaacatccgctgggaaatatcccctatggttttctgtatatcgcaaaagcgcatcgttccattcgctttcagtgtgaccagcacaagcattgtccatttgtctcccaacctgctcagtacatcccgtaccggacaagcatccatacgatgaaaattttccattcctttattttaccaatcagtttaacctcagcaatggcggctctatgcttagtgtccggcattacaccacaaaagtaataaacttactcaaaataactatcgtttcatacaataattaaaacattctttatactcgtaaatgcatccgcctcatccggattatttgtatttttgcaacatcgtttcctattcatatgtaactgcaagactcttatgaacgtaaaaatagaagaaagctggagaaaacacctgcaagaggagtttgacaaaccttattttgagaagctggtagcatttgtaaaaagtgagtatggacatgccaacgtgctacctcccggccatcaaattttccacgtcttcaactcttgcccgttcgagaaagtgaaagtcgtcatcctcggacaagacccttatcctaatcccggtcagtattatggagtctgcttttccgtaccgaaaggaatagccattcccggttctctggcaaacatattcaaggaaatacatcaggacttgggaaagcccattccgacttccggaaatctggaccgttgggtagcgcaaggcgtgtttcctatgaattccgtcctcacagtacgtgcccacgaaaccggctcgcaccggaacatgggatgggaaaccttcacagacgctgttatcaagaaactgagtgatgaacgggagaatcttgtattcatgctttggggagtgtacgccaaagagaaagccgctttaatcaatagcagcagacacttgattctgactaccgtccatccgtccccacgttctgccgaatacggattcttcggttgcaggcacttcagtaaagccaacgatttcttacggagcagagggatacaagaaattgactggtaacacgctacaatactccgctgactccgcttccaaacaaagcaaagtcccccaggcacgggtcgtccggaaaggcctctgccagagcttcagtaatccggcgggcattcttcaaagaaaatgtttctgtctcggtgagtcccaaagcataggccacacggcagacatgcgtgtccaaaggcacaatcaggtccctgcaatcaaatctctcccaaataccaaaatccacttccggacctttccttatcatccagcgcaaaaacatgttcagtttcttttggggactctttgccgagacttccaaaaacgcacataacctttccatcggattaccggcatacgtacataaggcatcctccagactgtcaaaagcagaataggcagcatgcaaacgcctgaaataggaatgaaagtcagcataagaaagcattcggtaaaaactgcttctgtccgtagcagggaagtctttcttccattggcaagataatacgtattgatgaggcgatacccccatcaacctatgcaactcatcagcctttttcaatatctgcttacggttgccgaaactcatgatagcagtcagcagcccactgatttcaatatcctgcctccgttcatagcgatgtggaaactgtatgggatcgttctgaatgaagccggcgcaatgataggccgccgcccactcccaaagttgtcttttaatctcctcggtcatctgcaagcatttgttttttcatctgaaatgcaaagatattgcaaatcgaatgcaaaactttcatgcttgcacgaaaaagttgtgccgggatatagcttatcttatttaaagatattgcatttatagcaacatcggacaagtaacctatttcttttcctcctatttttgcaacatgaaaaagcccaatagagccatgcagcagaaaaagacaacccaggaggaataccaaaagtgtgtgaacgcagtagtggattatataaatctgcacctcggagaagaaattgacctgaaatctttggccaggatttcccatttctctcccttctacttccaccgcatcatgaaagcttttctgggtgaacccgtcggtacgttcattgtccggacgcgtaccgaagccgctgcccggttgcttcgttactcggacatgccgatagcggacatagcctaccgtataggctactcttcgccctcgtcactgtcaaaagtattcaagcagttatacggcatttcaccattagagtatcgtaacaataaaaactttgtaattatgaaaccagccattattcgtccggaactggaactgaaacacgaaatcaaagaagttcctgcccgcaatgtgatttacatccgcctctttggcgactataaactgaacgactattgcagcgcatggacgcgcctttgccagttcatccaggaagaaaaactgcctatgggagaagtgatgccctactgcatctatcacgatgaccccaaagtgacaccccctgaaaagctgcgtaccgatgtatgtatggtcctaccctcatttgcaacggccaaaggagacataggatttaaacagctcgctgcaggccgctatgccatattcctatacaaaggtccatacgaacatctgcaggccgtatacgacaccatctacgggaagtatatccccgaaatggaatgtagcttacgggatgagtccagtgcggaacgttacctaaacaaccccgcagatacggcgccggaggaactgttgacagaaatttatattccggtagagtaggcaaactgttctgccggagccatcagactttctccccggaagagtttaggaaccggacagcgaacaagtattcgttcctccatggagtaaaaatcgttccaccatggtggaacgatttttactccgcggtggaatgatttttacctcatgatggaacgaataaatatcaggcaagccggtcgatactatattagatacccatatctatactgtattgtaaaaaagggacactcccttgtctgtatgcttgtttttattcattaattttgcacgacgcaatgcgaatcaagcaattgacgcaaacagataattttaaaatctccattaaaatcaagataaaaaatgcaaaatgtctccataaaagggtttatatatgcggctctctcctctgccaccttcgggctggctcctttcttcaccatttcattactccttgcgggcttctcctctttcgaagtattggcctaccgatggggaatagcttcacttgccttggtcgttttcggcattatgctgggcgagacattccgcatcagcaggaaagactggggaacggtgttcatcctcagcctgctccgggcagctacctccttcagtctggtcatcgcctatcagaacatagccagcggagtggcatccaccattcatttcatgtatccgctggccgtggcactggccatgatgggctttttcggagaaaagaggtcattcgccattctgtttgccgtgttggtgtcactaagcggagctggacttttgtcatccggcaaaatagactttgaaggaggaaacacgaccatcgggctgattgctgccggcctgtccgtattcttttatggaggatatatcgtaggagtaaggaagagccgtgccgtgcagattccctccactgcattgacatgctacgtaatggggttgggagccttgttctttattataggaggatgtctgaccggaggcatccggctggccaatgacacccatacatggctgaatattctcggactggcactgccggcaacagctatatccaacatcaccctggtaaaggccattaaatacatagggcctacactgacttccattttcggggccttggaacctctgacagccgtagttatcggttgcctgatattcaatgaaagcttcacaccggccagcgtcgtcggcatggcgctgataataacggccgttacagtcgtggtggtacacgaaaagaaaaaggagagccagagttgattgtccttatttcgcctttttataatccgtgatgaaaccctccatcatccacttggccaaggcctggcggttcgaactgattacaaaacggcgctggtcaaaagtgttctggatatttcccaattccacgaatacggaagcgggagaagtattggctaacacataaagattgcgtgcgctgacagttccagtaaacccacggttgggctggtgcttgtcatatttcgattcgaaagttttcttcatggtcttagccagacgcttgctgtcgggcttgcttttagagtggtaaaagaacacatcggtctgatggctcttgctgcgactgtccacatgaaggaaaatggcacggcaatatttatagttcttgcgatccttcttgtaaaactcattgattttggcgcaacgttgccggagacgtgccacttggttcaagggtatgggagctcccatgcacgtctcacgtttgctgttggaaaggtacttgtcatcacggattccgtctttagcatcctggataatgatacggacttccgccccctcttgcatcaagttacgggcaaggcgcaaagccacatcatacgcatactcatcttcatgcagttctattttgccgattctgccgatagctccggggtcggggcctccatgtccgctcactacataaaaacaagcgccctgcaaacggttggatgtcacttttacactggcaagcgctttcccgaacaaaggttcattgattgtcttcttcccattgccaaccggctttgataatgggggcagtacatacttcactcccagccgcaattcctccttccctttaagaagtttcttgttcagctccaaaaactccttataataggctctccccgggcgcttgttacgttccaggaaaacagagattccttctccacgtctcggactatcccgctcttcctgagccgaagcattaaaaacaaacaaagtacaaaagaggatggtcagtaaacaaaatatgcgtttcatattccaattattcatcatttattcggttcgctacaaatttccagccgctaatttatagcattttaccatacttaagcacaaaattataattttttccctacttttgcgacaacttacgcgataatagataagaaacttttaaaacagataacattatggcaaagcaattcaagccggagacgctgtgcgtacaagccggatggactcctaaaaagggcgagccccgtgtactccccatctatcaaagtacaactttcaaatatgataccagcgaacagatggcacgcttgtttgaccttgaagacagcggctatttctatacccgcctgcagaaccctacgaacgatgcagtagccgccaagattgccgccctcgaaggtggtgtggccgctatgctgacatccagcggacaagcagccaacttctatgccattttcaatatctgccaggcaggagaccattttgtttgctcctctaccatctatggcggaacattcaacctcttcggagtgactttgaagaaattgggcatcgacgtcactttcgtcaacccagatgccagcgagaaagaaatttccgctgctttccgccccaataccaaggccctattcggcgaaaccatctccaaccctacgctcgaagtgctcgatatagagaagtttgcccgcattgcccacagccacggcgtgcccttgattgtggacaacaccttccctacccccatcaactgccgtccgtttgagtggggtgccgacatcgtagtacactctaccaccaaatacatggacggacatgccaccagcgtaggtggagccattgtagacagcggtaacttcgattgggatgcacacgccgacaaattccccggactgtgcaccccggacgagtcttaccacggactgacttatacgaaagccttcggcaaaatggcttacatcaccaaggctacagcccaactgatgcgcgacctgggcagcatccagtctccacaaaacgcattcctgctgaacctgggtctggaaacactgcacctacgtatgccccaacattgcaagaatgcacaagcggtagccgagtatcttgcccagaacgacaaagtggcttgggtgaattattgtggtctgccgggcgacaaatactacgagcaggcacagaagtacatgccgaacggctcttgcggcgttgtcaccttcggcttgaagggcggacgggaagagtctatcaagtttatggattcactgaaactggcggccattgtgactcatgtggccgatgcacgtacttgcgtgctacacccagccagccatacacaccgccagttgacagacgagcaactgatggaggcaggtgtacgccccgacctgattcgcttctcggtaggtatagagaatgcagaggatattattgccgacatcgaacaagcgctgaacgcctaaaggaataaacaaaagggagtgcattttcggacaatgcactcccttttcatttcaatattctctattactcaacattcaatataatcgtcaaactttccttgccttggtagaaggtctttgctttcactaccagggaaccacacttcaccggttctttccataaggttgactgggcagtaggttccgaaccatcagttgtgtaacgtacttcagcaccatcaatggccacattagcatacagatttccatcttttaccaataatcccggctgaggcaagcggaagttaatcccattctttgcccaataaggcatttcactcttgctgattttctcataataaagtgccaaagcctgattgaaagcctgctgctcccgcatgccggacaggttttcccataccggatgagcattccagccacgttctgccagccctaatattttggggaaaagaagatattccacgccatcaaaactacggatagtttcggcaaacaattgcccttgtacacccataatatgcttcttgcctatctctgtcaaagcagtcttccccttttccgcattatccaaatcaatgggattgcctgccatatccacacgcagtgaacgataaatgctgaaaggaagcatagagaaagagacagactcatccacataacctccccaatcgagtccacgctcgtccggatgaccattgtaagccatatccatatagaaattgcccacgttgcaaaggatgaccgggtaaccgttattggctgtctgataaaccacttcatcagagcccggtacagtattccagcaatacacaccggcagcctggcccctcaactgttgatgagcctcttcggtatgccccaaagcaacttcctgccaaccactgaatttcagtccgttcttctgcatcacatccgccatttgcgtaatgaaatactctgacaaaccatgagctttcgtcatgcctttttccttcatcagttcctggcatttcggggagcccatccacacaccgcgaggcacttcgtcaccacccaaatgcactgtgtacagtgaaagaccagcttcctgatacatcgcattaagttcctgaatcaccttctccataaaacggtaagtagaaggcaaggcgacattcatcacattgtccgtataatattgtacagaaacataacgtgaagtatcttccggttcactcaacatatattctgtagctttccccggatcagtttcaaaatatttgttatagcgtgccctcatggagacaatggcagcgcgggcatgccccggagattctatttccggaacaatgcggacatgtctttcggcagcatacttcagcaaatcaataaattcctcgcggctataatatccattgcctacagtctttgcatcagggtcatagccaccgtcataacatgggtagaggcactggctttcgtcagtggtatgcccgcgacggctacccacagcagtcagttcctccaaaccaggaatctccaaacgccaggcttcatcatcacaaaaatggaaatgcaggacattcaatttataagatgcaaaaatatccaccagtttcttcaagttctccggagcggtgaaattacgggcaatatctatcatttgtccacgatatgccaagtccggataatcccgaatggagactgcctccagcaaataaggtgtctgcttgcccttcaacattgacaaaagtgtctgtgtaccattaaaaatgccatgaggagtggcagcactgatttttatcaggttgtcacctatattgatagtataatattcatcatttacggcctccttcctatcaagcagttcttccagcacaatcttcacggaagcatttccgacaacttccaaaccatacaaaccagtcagtttctctttcagcaacttggcttcaccgacaaagttctccggaaatgccaaagctaccttaccttccaatacgacattatcgccttcaatggctaccactttctttacagacggaagaatgtctgactgcaccaaagcaggagcaccagccaagcgaagattggattcataaatcttagtcgcatccggatagccgctcattgactcgggagaaggaagcggcagcgccttcaaagccacgggcaacggactgccctctttaccatccacagtctccacccaataagttccttccggtacatgggagttccggtccagcttgtaagtgcaaaggaaagtgatccgcatggaatcaccgggagccagcggagcaaattcgtctgtcggatacattttgaaaaaattaccgttcactacctctaccttcacttcagaggctccttcctgcttcacccctcggggaagctgtgaatagtaaatcgtccagttcttttttagaggtttttgagagatattcttgagaataaaggtattctcataatatccgggttcgatgtcacttgcacccatttcccaggtcagagcaaccggtgccttaggttcattactcgttttacatccagcaaatagtgccattacacaaaataataatcctgccagaggaagtttcaaaattctcatgcaactcatgtgttaagttaataaatgggggtaatctctaaaatctgatgccaaaaataagcattttaagctaattaactgataaaagtaatagattttattgacagcgagctacaatttagaacttttatacctacatttgcagccaaattataaccaatttaactattctaccatggctaaaataaccaaagaagcagccttgctctaccattcgcaaggcaaaccgggtaagattgaagtagtacccaccaagccttacagtacacaaaccgatctttctctcgcctactctccgggcgttgcagaaccgtgcctcgaaattgagaaaaacccgcaagatgcatataaatatacagcaaaaggcaatctggtagctgtcatctccaacggaaccgccgtgctcggcctgggcgatatcggtgccctcagcggcaaacccgtcatggagggtaaaggtctgttgttcaaaatttatgccggtatcgacgtattcgacatcgaagtaaatgaaaaagaccccgacaagttcatcgaagctgtcaaggctattgccccaacattcggaggtatcaacttggaagacatcaaagcacccgaatgtttcgaaatagaacgccgcctgaaagaagaattggacatccccgtgatgcacgacgaccagcacggcaccgccatcatctccagcgcaggattgctgaacgccctggaagtggcaggcaagaagatagaggaagtgaaaatcgtcgtaaacggtgccggggcttccgccacctcatgtaccaaactgtatgaagcgctcggtgcacgccgtgagaatatcctgatgctggacagtaagggagtcattaccagcgatcgcgagaatctgaccgagcaaaaacgttactttgccatcgaccgtcgcgatgtacatactctggcagaagccatcaaaggcgccgatgtattcctcggactgtcaaaaggtaatgtgttgacccaggacatggttcgcagcatggcagaccatcccatcgtgtttgcccttgccaaccctactccggaaatctcttacgaagacgccatggcagcacgtccggacgtactgatgtccaccggtcgttccgactatcctaaccagattaataatgtaatcggtttcccctacatcttccgcggcgccctcgacacgcaggcaaaagccatcaacgaagccatgaaaattgctgccgtacacgccattgccaaccttgccaagcagcccgtgcccgatgtggtgaacgaggcataccacgtaaacaacttcacttttggtcccgaatacttcatcccgaaaccggttgacccgcgcctcattaccgaagtgtcctgcgctgtggccaaagctgccatggaaagcggtgtagcccgcaaagacatcgaagattgggatgcctaccgcctgcaactgcgcgagctgatgggttacgaaagcaaactgacccgccaactctacgacaccgcccgccgcaacccgcaacgtgtggtatttgccgaaggtatccaccccaatatgctgaaagctgctgtggaagccaaggctgaaggtatctgccatcctattatattgggcaacgacgaagccatcgagaagctggcaaaagaactagaccttagccttgaaggtatcgagatagtaaatctgcgtcatccggatgaagcgccgcgccgtgaacgctatgcccgcattctatctgaaaaacgtgcccgcgaaggagccacttacgaagaagccaacgacaaaatgttcgaacgtaactacttcggtatgatgatggtggagacgggtgaagcagacgctttcatcacaggtctttacaccaaatacagcaataccatcaaggttgccaaggaagtcatcggcatccgtccggaatacaagcatttcggcaccatgcatatcctgaactccaaaaaaggtacatacttcctggccgatacgctgattaaccgtcatcccaatgccgaaacgctaatcgatattgccaagctatcggaatataccgtccgcttctttaatcatacaccggtaatggccatgttgagttactccaacttcggtgcggataaagaaggcagcccggtaagtgtacacgaagctgtggattatatgcaacaaaactatcctgaccttgccattgacggagaaatgcaggtgaatttcgccatgaaccgcgaaatgcgtgatgccaagtatccgtttacgcgcttgaaaggaaaagacgtaaacacactgattttcccgaacttgagttctgcaaactctgcttacaagctgttgcaggcgatggatacggactccgaactgattggtcctatccaaatgggattgaacaagcctatccactttaccgattttgagagctccgtgcgcgatatcgttaacatcactgcagtagcagttatcgatgctatcgtagacaaaaagaaggctgccaaatgagacgaccgttatcaaaattccaaatagtttgcattgtgctgctttgggcagcactttgctacattgttttgatatctgtcgaacgaattgacggtccaattatcctaacgcttgccatttcggcggctttagtatttattcccgtcataaagtctctaaaaagaggataaataatatctttttattccattttgcggtataaaacaataaaattgttgttttataccgcattttctttataaaatgtttgctcgtttcatttttatgtatacttttgcaaccgcaatgagaggaaaaggaaacaaaccgaaaatcgaattgttttaggtaacatatagtagcaaccaataaaagaaatagattatgaatgcagctaaggtattagaagacctgaaaagacggttccccaacgaaccggagtatcatcaagcagtagaagaagttctttctacgattgaagaagagtataacaagcatccggagtttgacaaagccaatctgattgaacgtctttgcatccccgatcgcgtttaccaattccgtgttacttgggtagacgataaaggtaacgtacaaaccaacatgggctatcgtgtgcagcacaacaacgctatcggcccttataaaggcggtgttcgtttccacgcttctgtaaacctgagcatcctgaaattccttgctttcgagcagacatttaaaaactcattgacaactctgcccatgggtggcggtaaaggcggttcggacttctctccgcgcggcaagtcgaatgctgaggttatgcgtttcgttcaggctttcatgctggagttgtggcgtcatatcggtcctgaaacagacgtacctgccggtgatatcggtgtaggtggtcgcgaagtaggtttcatgttcggtatgtataagaagctggctcatgaatttacgggtactttcaccggtaagggccgtgagttcggcggttcgctgattcgtccggaagctaccggctacggtaacatctacttcttgatggaaatgttgaagactaagggtactgacctgaaaggcaaaacttgtctgatttccggttccggtaacgtagctcaatatacggccgagaaagtattggaattgggtggcaaggtattgaccatgtctgattctgacggttatgtatacgatccggacggcattgaccgcgaaaagttggattacatcatggagctgaaaaacctctatcgtggacgtatccgcgaatatgctgaacaatatccgggtgtgaaatatgtggaaggagccaagccttggggcgaaaaggctgatatcgctttgccttctgccactcagaatgaattgaatggcgaccatgcccgtcagttgatagctaatggggtaatggcagtatccgaaggcgccaacatgccctctacaccggaagccatcaaggtatttcaggatgcaaagattctgtatgctccgggtaaggcagccaatgctggcggtgtatcagtatctggtctcgaaatgactcagaactctatcaagttgagctggagtgcagaggaagtggacgagaaattgaagagcatcatgaagaacattcacgaagcttgcgtgcaatatggtacggaagccgacggttatgtaaattacgtgaagggtgccaatgtggccggatttatgaaggtggcaaaggctatgatggcacaagggattgtgtaaggactaaagccatagtacaactataacagaagaaaggtgaggagctcaaagcttttcaccttttttctgtttagataatatagaagaaacaaaaaattatctcttttccaatccattgtcacataaatcagatacttttgcagaagttaatgaaagaagaccatcatcattgaataaaatcaaacgattatgaatacaacagaaatccccgtactgctgttgaccggttatctgggtagtggcaaaacgacgttggtaaatcacatcctttctaataaacgtggcattaagtttgccgttatcgtcaatgacataggcgaagtgaacattgatgcagaccttatacagaaaggtggcgtggtgggaaagaaagaggaaagtctggtagctctacagaatggttgtatctgctgtacgctgaagacagacctgatagagcagatgttcgaaatcatgaagatgcaacgcttcgactacatcgtgattgaggcgagtggcatctgtgaaccggaacctattgcccaaacactctgctccattcctcatatgggaggagcgtatactaaatacggtatttgccgcttagactgcattaccaccgtagtggacgccttacgtctgcaaagtgaattttcttgcggagataacttgacacgcaaaggcattgatgaggaagatatagagaacctcatcattcagcaaattgagttctgtaatattatcctgctgaacaaagcagcagaagtacagcccgaggaattaaaacgtatcaaacagattatccgcaccttgcaacccggtgcccaaattatagagtgcaattatgcagatgtagacctggataagattatccatacccacctctttaactttgaacgtgccgcaacttccgccggatggattcgtggcatagagcaacaagtaagcgaagaggaggaaaaagaggcgcattaccatcatgaagagggtcatcatcaccatcacgaagatgaacatcatcatgaaagcgaacatcatcacgagaaatgtcatcaccaccatcacgaaggaggtgaagtagaagaatacggtattggcacatttgtctactaccgccgtcctgcattcgacattcataagttcgaccactatgtcgctaccaaatggccccgcagcgttatccgcaccaagggtgtctgctacttcagccacaaccgcgacatgtccttcctctttgaacaagcaggtatacagaagaaaataactgaagccggacaatggtatgccaccgcccccgaagaagacatgatagaactgatgcgccaagaaccgggattgctaagagactgggacgagcaatacggcgaccgcatgctgaagatagtattcatcggacaaaatatggataaagagcaaatcatccgcgacttggacaaatgccttgaataacttcctaaaaaagtgctccctgtcattccgatcttaagaacaacggggagcatcgtcccaggcgcgtaactctattttaagaatcaggaaccatatcaattctccgtaaaacggaacattttgaaatacaccttctgctctgtgtcggatacattcaccagcctcatcttcgcaacgctcaaatctttgagagatgccttcacctgcgttctgtatcccggcttcaaatccaccgcctgccagtttgtgccatccgaagttacttccagtttaaacttcgaatcagcaacctccgcatctcccaaatcgataagcaccgaactcaactggcgggcataatccatcgaaatggtcagcacaccgcctgcctgccagttgatgacttcattggacggaataattgtattcacctttcccttctgctgaataggaagcgaagccaactgattcacgtcgctcttcaacgtgtagggagaataaacagcctttgtatcaagcccggcatggaacgctgcattatagcccgttgtcgccgcttcgaacaaagcattgaaagtaggcatcagatgcaggctaccgctctttatgcccgctttatattgggcatccgtctcacccatcagcaccagcagggcgcgggcgtgttcgtagctacctataaatgcatccttctgctggcgcaggcgtatcatgttcagcacctccgcaccatactctcccacttgtttgaactgaatgagccaaggccttatttcagttatcaatggacgattctcatttcccgacgcaagcaatccatcagcggcaacgattatcttccggcattcctcagctacctgccgataggcatcttcatctatctcgtttttctcttgataggctttcaacaaggcagagagagcaggctgaatggcaacggactcttcacgacggaagcgatgtccattctgtcccgggtcggaattatgagcagcgaagatttccaaatattcggcatgaagtggcataaggtctctgactgcatgtttccaagaagtttcactatcataattctccatattccaagtataatcagctacactgtacagagagattttggaagcctcggcatgttccatcggattggaaacaaaagcagacatatcatcttttatatcaagcccgtttccataaaccggccctagcagcaaatggtcttgtacataatccgaaacggggaaattccaccaaatgtacgccttacgtttcagaagcggattgacgaagtccagcgtagacttatctatagtagcaactaccatatcaccggtccacatcaccttgataccctcgttcaacttatcaccaagcgtagtgagatagcccccctccacatcagtccatgacttgttatactccgtgggacacagtattaacggcgcaacatcccgcttgacttttacaaaatggtcatcaatatagttcaacagttcagcctgcttgtccgcctttgtcccttcacccgaaatatcatcaaagaaaacggcaaaaccacgcacacccaactggtacatgctttcgaacttctgcaacaataacgagcggtcttcttcattccagcgaatatcctgacccggatgaatggcccaatagaaaataacattgttctccttcgccctattcaccaatactttcaactcttctccttctcgagcaggataaggcttgcgccagttgggagtccggtgataaggatcgtctttcggtccatagatatagacattcattttgttccgaccataaaaatcaagctggcgtatacgcgcctcctgactccaaggagcaccgtaaaacccttccaccacaccccgatagggaacatcgggatagtccgtcacttcagccaaaggcagcttgtctaaagcaagcaactgcgcaagagtctgtacaccatagtacgctccccgttcgtcagcaccggctatgacgatgcagtctttttctattttcaggaaataaccttcggatttgcgtggaatccgatgttggtatttcttaataatcttatctcctttcactcctatatatacacggaaagaagcgccaagcacctcttccggcatcaatgaacggagtaaaggcaacgcaggtccgtcctgcacggaattgccggaaaggatctggtattgtcggggaatatcaacagaatctttttgcgtaatatattcttggggagtaggttgcaaatgaaactcttgcgcacaaagcgtcgctgtcgtcagcataccgaatgctcccagtaacagtagttcttttctcataagcggattataaaattaaggaatatctatgtattaagaaaactcttccatgcattcaaggttgatacgttcaaaaataagaaataaatatgaaaacacgtacaaatacagacatttatttcagtttaaagattcattctgcatccgtttgagttcatcgcacactgccggatgcaggaagtagcgtacgtctttcccctcctccatggcccgacggataaaagtggagctgatttcaaatatcggagaagaaactgtccgcacattttgaggtaaagaggcggcctctaccggatagccggggcgaggatagaccagaagatgattttcggcaagaatacgttccgacttgtaccaacggtggaacagcctccagttgtccgaaccaatgacaagatggaaagtgtgttgaggataagttcgtttcagcgcatccaacgtatgaactgtataagaaggccgaggcagatggaattcaaaatcggaagcgcgaaatttgggataaccctcagtggctagctgcaccagcttcaaacgtaacttgtcatccatcagttcgttttcttccttcagcggattgtggggggtgaccataaaccacacttcgtccaggtccccgtattcgcaaagatagttggcgagggccaaatgtccgatgtgtatcgggttgaacgagccgctgaagattcctatattcatttattcttattcatatacaaccttacaaaggacgtctttgcaacgcacgccaggcagcccaagcattgaaaatcgtcactacagagataagaaacattgaaatactggaacgaggctcgccatgctgtatatacaatacacccacaacaagggagcagacgaacaaaacgctattaataatcaacaaagccttgttcagcttcgggctgttcttcctcctcggtgccaactggttgtacactcctccacgttgtttcattcgttcaagaattgagagattactttcaatgcttccgctttggctgtctccaggtcatcgttcacaatcacggtatcgaacttcggtgcaaagcccagttcgtattcggctttcgccacgcggctctctatcacttcgggagcatctgttccgcgccccaccaagcgtttgcgcaattcctccactgaaggtggctgaatgaaaacagacaaagcacgctcaccatagaatttcttgatattgcaaccacccactacatccacatcgaacactacattctgtccggcagccaattgcttttccacctgctccttcagtgttccgtaaaaacggtcctgatatacctcttcatactccaggaattcatcattggctatgcgacgacggaactcgtcaggagtcagaaagaagtactccactccatctttctccgttccgcggggcggacggctggtcgctgagatggaaaatgccaagttcagattttgagtcagcagatagttgataatcgttgacttgccggagcccgaaggggctgaaaatatgataagttttgccatcgaattatttacgatttgacgatttactatttgatactacatgacgttcaatacttgttccttgatttgctccaattcatctttcatctgaacgacaatcttctgcatctccgcatgattggacttactgcccaaggtattgatttcgcgtcccatctcctgggcgatgaaccctaacttcttgccttgtccggttccggtttccagcgtattgataaaatatttcagatgattgccaagacgctgtttctcttcgttcacatccagtttttcgatgtagtagatgagttcctgctccagacggttcttgtcataatccacgctcaaggtcttttccagtgcatcggtaatacgctccttcactttggccacacgctctttctcgtagggagcgatagtctccaacaaatgggagatattggcgatcttctcacggaacttcttttcaagggcagctccttcctgcttacggaagtccaccagcgcaccgacagccttttccacagccgaatagaccacagtccattcctcctcactcagttcctgcgtatcattcttcgtcatcacatccggcatacggagtaacgtggcaaaccagtccgtcgcatccggcacaggtattcctagattttctgatatagcacaaatctgcttgtaatatccctcaaccaatgtctggttgatgggagtggcgctttccgcactctctttcttttctatccaaaggctgaaatccacctttccgcgctccagtttccgtgatatttcattacggatttccatctccttctcacgataaagcggagcaatgcgggcagataggtccattgccttactattgagcgactttatttcaacgttgattttcttatcaggcagttcgacggttgctttgccgtagcctgtcatagattgtatcataatgttatagttttgcgcaaaattacacgattattttaattagtgaaaataatcacgtaaatttgccacaataaaatcaagaataaaagttatgtcatgtatcttgcatattgaaacgtccacttctgcctgctccgtagccgtgagcgaggatggacagaacgttttcaagaaagaggacctgaatggcccttcacacgccgtttcattgggaatctttgtggacgaggcgctatcctttgccgatagccatgccatgccgttggatgcagtcgccgtgagctgcggccctggttcgtataccgggttgcgtatcggcgtgtcgatggcaaaaggtgtctgctatggacgtaacctgccacttatcgggctggaaaccctgaaagtccagtgtgtaccggtattgctctaccacgatgagttacccgacgacgcattactctgcccgatgattgacgcccgccgtatggaagtctatgctgccatctacgaccgtgccttgaaatcggtgcgcgacattgcagccgatattgtggacgaaaactcctacctggaatttttagagcaacatcccgtctatttcttcggtgacggtgcagccaaatgcaaagagaaaatcacgcatcccaatgcacacttcatcgacggcatccgcccgcttgccggcatgatgttcccgttggcagaaaaggcaatagccgaacaagatttcaaggatgtggcctatttcgaacccttctatttgaaggaattcgtagccggcacgccaaagaaacttatttagggtttagcgattagggattagggatgaataccatgcggtatcactacgtagcccattaatcactaatcactaaccactaatcgctaaaccctaatcactaatcgttgaacattaatcactaattaaagatgcaatataacactcaacaaaaacggatgcccctacccgaatatggtcgtagcatccagaatatggtagaccacgcgctgacaatcgaagaccgtgcagaacgccagcgttgcgcaaacacaatcatcaacatcatgggaaacatgtttccccatctgcgcgatgtgcccgacttcaaacataagctatgggaccaccttgccatcatggccaacttccaattggatatagattatccgtacgaaattatccgcaaggacaatctgaataccaagccggagagcatcccctaccccagtaccaaaatccgctaccgccactatggccgtacactggaagtactgataaagaaagccatcgaatttccggaaggagaagagaagcagaacttgatagcgctcatttgtaaccacatgaagaaagactacatggcatggaacaaagataccgtcgatgaccgtaagatttcagatgacctcaccgaactctctgacggaaaactgcaaatgacagacagtatcgtccgtctcatggccgaacgtattgaccagaactaccgtccgaaagtgaacaaccagaataaccggaacaacaaccggaacaataaacggaaatactaaaattgaatgattagtggttagtgattaatgccatgcggcatcaccatgcagaccactaatcaccaacccctaatcactaatttcatggcatcatttgtaatcgaaggaggacacagactttccggtgacatttacccccaaggagcaaaaaacgaggtgttgcaaattatctgcgccacattgctcactgccgaagaggtgactgtgcacaatatcccggacatactggacgtcaacaaccttatccaattgatgcgggatatgggagtcagcgtatctaaaaaaggcattgacacttacagctttcaagctgccaacattgatttcgcctatctggaaagtgacgcgttcctgaaaaaatgttccagcctgcgcggttccgtcatgctggtggggccgatggtggcacgtttcggcaaggccatgatttccaagccgggcggagacaagataggacgccgccgtctggatacacactttatcggtatccagaatttaggagccgactttgtctataatgaggagcgtggcatctacgaaatctcagccaaacaactgcatggcagttatatgctactcgacgaggcatctgttacgggaactgccaatatcgtaatggcagccgtccttgccaaaggcaagaccaccatctacaacgccgcctgcgaaccctacgtgcagcaactttgcagaatgctgaaccggatgggagctaagatagaaggcatcgcctccaacctcctgactatcgaaggagtagacgagctgcacggaaccgagcataccatcctccccgacatgattgaagtgggcagtttcattggcatggcagccatgacccgtagcgaactgaccatcaagaatgtctcctacgagaacttgggaattatccccgacagtttccgtcgactcggcatcaagatggagcagtgggaagacgacatttacgtgcccgcacaagagacgtaccagatagagtcctttatcgacggctccatcatgaccattgccgacgcaccctggcccggactgacaccagacttgctcagtgtgctgctggtggttgccacccaggcaaaaggtagtgtactcattcatcagaaaatgttcgaaagccgtttgttctttgtggacaagctgatagatatgggagcgcaaattatcctctgcgacccgcaccgcgccgttgtcatcggtcacgaccacggctttaaactacgtggcggcaacatgacctcgcccgatatccgtgcgggcatcgccctgctgatagctgccatgagtgcggacggcatcagccgcatccacaacatagagcagatagaccgtgggtatcagaacatcgaagggcgactgaatgcgctcggagcaagaataacaagaatagaataagatgataaagagagaagaagtatataagataggtatattcaacaagccccacggcattcacggagaactatcgttcacttttacggatgacatcttcgaccgggtggaagccgaatacctaatctgcctgctggatggtatactggtgcctttcttcttggaagaataccgtttccgctccgacaccaccgcccttgtcaaactggaaggcgtggacacagcagaacgcgcccgcatgttcactaatattgaggtctacttccccgtaaaacatgcagaagaggcaggaccaggtgaactgagttgggacttcttcgtcggttttcgtatggaggaagtacatcacggcacgctgggagaagtgacggacgtggacacatcgaccatcaacacactgtttgtggtagattatcagggagaagaactgctggtgccggcacaagaagagtttatcatagacattgaccagaagcacaaggtcatcaccgtagacctgccggaaggtttgatagctttggacaaaacagaagaggtatgaaaaagaaacgaagaaaagcattttggagtaacatcaagttcaagtacagactgacgattacgaacgagaatacccttgaggatatcatcacgttgcgcgtatccaagctgaacggactgtccgtattgctctccgtgctgttcgtattgtttctcatcgcctccctgatcgtagccttcaccccgctgcgcaactacctgccgggatatatgaacagtgaaatccgtgcccaggtagtggagaatgccttgcgcgtagattccctccagcaactggtgaacagacagaacctctatatcatgaatatccaggacatcttccagggcaagataaaggcagataccatacattccatcgactcgttgacccacctgcgcgaagattcgctcatggaacgtacacaacgggaagccgaattccgcaaacagtacgaggagacagaaaagtacaacctgacgagcatcaccgctcgccccgaaatagacggactgattttctaccgccccacacgcggcatgatttcatctcccttcaatgccgaaacaaaacacttcggcacggacattgccgccaatccgggcgaaagcgtattggccaccttagacggtaccgtcatactgagtacctacactgccgagacgggttatctgatagaaatacagcacaaccaggacttcgtgtcagtctacaagcattgcggctctctgctgaaacgggaaggcgatgcggtgaaagggggtgaagccatcgcactggtaggaaacaccggcgagctgtccaccggtccccaccttcacttcgagctgtggcataagggcagggccgtaaatcccgagctttacatcgtattttagtctccaaatagtaaattgtaaatagcataatagtaaatgaaacagattgccatactcggttctaccggttccatcggtacacaagcgttgcaggtcatcgaagaacatcccgaccagtacgaagcatacgtattgaccgccaataaccgcgtagaggaactcatagcccaggcacgcagattcaagcctgaggcagtggtaatagccaacgaatcgaaatacacgcaactgaaagaagcgcttgccgacctacctatcaaggtatatgccggcgcagatgccctctgccagattgtgaccgaaaatcccattgatatggtattgaccgccatggtgggatatgcagggctgaagcccaccatgaatgccatccgagcccgtaagccgatagcccttgccaacaaagagacgctggtggtggcgggagagctcatcaatgacctggcacgcttcagcggtgtccccatcctacccgtcgactccgagcactccgccgttttccagtgcctggccggtgagataggcaaccaaatagaaaaagtgatactgactgcctccggaggtccgttccgcacctgcactatggagcaactaacaaccgtcaccaaagcgcaagcactgaaacaccccaactgggacatgggcgccaaaatcacgatagactctgcttccatgatgaacaaagggttcgaggtaatcgaagccaaatggctgttcggtgtacgtcccgaccagatagaagtcgtggtacacccgcaatccgtcatccactccatggtacagtttgaggacggtgccgtgaaagcacaactgggaatgccggacatgcgcctgcccatccaatatgccttctcctatcccgaccggttgaaagcctctttcccgcgcctggacttcaagctgtgtacggaactgacgttcgagcaaccggacaccacccgtttccgtaacctcgccctggcctacgaagcgctgcatcatgcaggcaatatgccttgcattgtcaatgccgccaatgaagtggtggtagccgccttcctgcaggacaaaatttcgttccttggcatgagtgaagtaatagaaaagaccatgtcgcgtgtatcctacttacagaagcccacctatgaagactatgtggctacagatgccgaagcccggcggatagcagaagagctgatttgatagatacaccggaatgaaaagaattataaaaaacatctactcatttgatacgttaaataagaaaacgtacctttgcgaaaattataaaaatcgtaaaacagcaaataattagatggaaacattcttgattcgtgccctgcaactcattatgagcctctcgttgctcgttattgttcatgagggggggcacttcctttttgcgcgtctgttcaagacgcgggtagaaaagttctgcttattctttgacccttggttcacattattcaagttcaagcccaaacacagtgacacggaatatggtatcgggtggctacccttaggtggttatgtaaaaatagcaggtatgatagacgaatctatggataccgaacagatgaagcaacccatgcagccatgggagttccgtgccaagccggcatggcagcgcctgctaattatggtaggcggtgtattgttcaacttcctgctcgcattgttcatctattccatgatactttttacttggggcgacgaatatataccagtacaaaaagccccattgggtatggattttaacgaaacagccaaagccataggcttccgcgacggcgatatcctaatatctgccgacggggtaccgttcgaacgctatgatggcgacctgctgaccagtattgtcgatgctcgccaggtaagcgtattgcgtgatggggaagctgcttcagtctacatccccgaagacatgatgaaccgcttgctggcagacagcgtgcgtttcgccagtttccgtttcccttatgtagtcgacagcctgattgtaggataccctgccgcttccgccggtctgcaagtaggtgacagcatcacccacttggatggaaagtcaatagcctactacgacttcaaagaagagatgctgaagcgcaagaaagccaatgcatcccatgaggtaaccttgacatacgtccgtaacggtgtgacagacaccttgagcatgatgaccaatgccgactatgaaataggcgtagcagcacgtacggcaaccgacaagctgctgcccgttgtccgtaaggaatacagtttcctttcctctttccctgccggcgtatctttgggggtaaagactctgaaaggctacgtaggccagatgaaatatctcttctccaaggaaggagccaagcaactcggaggtttcggaaccatcggcagtattttccccgccacgtgggactggcaccagttctggtacatgacggcattcctctccatcatccttgcctttatgaatattctgcccatccccgcactggacggcggacacgtgttattcctcatttacgaaatcattgcacgccgcaagcccagcgacaagtttatggaacgtgcgcagatggtgggcatgttcctcttgttcggtttgctgatttgggcaaacttcaacgatatactgaggtatttcttttaaagaacaagacataaaaaaacgcatcatccattcgcagtagaacggatgatgcatttacatcaaacagatgatgtgttcggggcaagcagacgatgcatttgagccaaacacatcatctgttttttctgtgtcttataccaaatggccgatccactcttctctatcgcccggaagcaggtctattaccggaacttcaaccattgtatagcaacccggctgctgacgcatagcggcacgcgccacacataccagcacttgtgccgtgagggcaggattgttgatacgcatgttgaactcaaatagctggttctgcgtcttgccggacacacccttacgggtcaagtttaccccatgccccatatcgagcagtgcatccacactcggaaccaattttacatgtgtttcgtcattcacgaagtacgggtcggctttgatggctgcagccaccttatcaaattcgtaaccatccttcaactcaatgtacaccatacgacggtgaatgccggttcctgtaggaatagtcatggaaagagcggctttcacaccttcgatggcctttacagccacggtgtgtcccatgctcatacccggaccaaaattagtataggtaatgcctttcggagcaatggcttccagcatagtgcggacaatggagtcactacccggatcccagccggcagaaatgatggataccgtattatgctttttagcctctgcatccagtgtgcggcgcaaggcagtgatacccgtatggatatcgaaactgtccacagtatgaatgcctaaagcaaggatctcctttgcatactcttccaccttgcgggtaggcgtacaaaggatagcaacatccacgtctttcagttccttgatattcttcacaacgggatatgcactcagttccgcaggacagttttcagctccggcacggcgtactacaccggcaatttcgaaatcgggagctgcttgcagggcttcgagcacataatgcccgatattaccatagccaacgatggccgctcttacttttttcattctttttatgaatttatttatcagttttctactttatcggcgcaaaagtaagcattttaatttattatatcggcagaactccctgctgtttcacacagtttttctttttttagtgagtgaaagtccaataataattcatacattcgcagatgatatgtatgcaaggcgcattttgggccgacaagtaaaagaattatgatagaatacatcagaggcggaattgccgaactaagtccggcaaccgcaataatagactgcaacggattgggatacggcgtcaatatttcattgaacacgtatgccgccatccagggcaagaaagaatgcaaactatatatatacgaagctatccgtgaagacgcctatgtcctctacggattcgccgacaagcaggaacgcgaactattcctgctgctcatctccgtttcaggcatcggcggaaatacagcccgcatgattctctcggcgctctcgccatccgaactgataaatgtcatcagcacggaaaatgccactctactgaaaacagttaagggtatcgggctgaaaacagcccaacggataattgtggatttaaaagacaaaatcaagaccggcagcgttgtagccggcaacgcagggaccataggtacactggtatcggcagccaacgcacaagtacaagaagaagccgtagccgcccttaccatgctgggctttgcacaagccccctcacaaaaagtagtgcttgccattttgaaggaagaaccaagtgcaccggtggaacaagtcatcaaattggcattaaaaagactataatctttatctaaaacaaatcatgacaacaatcaacatgcaatattggttgggggccaatgaacgcacccgcgtactgccaacagacaaatggtacctcgacttcgccacaagcatcctgcccctcgtcaaagcctctcctctgttcaacaaggaagacctgcgtacccaaattgacgcagccatctccctcggcatgtactttcaagatgccattgcccaaagcggaggctggaaacttttctccgaagcctttcaaggagtatacggaacttacctgccgttctatccactgggtgacgattatacgcccgatgaaataaatcaggaagacattgcattcgtactgtggacattgaaatcacaattcagtatttttgacaaggaatacaccttgttcagtccttatgacaaagacctgcttgcattaagccaaagcgcctatgaactgatggatgcacgtttcgaagaagctcccatcagcgagggagaatcttccttcctttgggtaatgggacttgatttactggatatgcccattactccgctgccggaagtcactccggaaaccaaactgagtaaagatgccgcccgctgtctggaatacagccaggggaaaccgctgctatacttcaccgattacaaggagctttgcactttctttgtcgatgtcttgggatgggaaaacaaacggtccgcactattgcccgacctggaataccaaaaagagttcgtgatttatgccaacgccaaaggtatgctcgtagcccacaacgtggccgcctatttctgtgaagaacataacccgatgtacgatgccaaacgcgctgctgcagagggttacaagatgttctgccaacccggagagtgtccgttcgacctgctgaaatacggaatgaccaaaggaattctacccgatgtggaacttcccttcctgaaaggaaaagaaacactgcatcaatattgggactttatagcccgctactacttatgtgaatattatgaaggcgagtaaccattccggcataaagcccaaacgaagcaacaaggccaagccaaccggaaaacggattggtaaatccaaaccttcgaaagcgaataatcagcttaacagaagggtgaaataatggaaaatggataatggaaaaacaaacagtgcagcgtatttattgaaaccgcatggcaattttccattatccattatccattatcaattttcaaagttccacaatctcttccttacacaacgtcagtttctccactccttccgctgttacaacccaagagttttcgataccaacgggaccaatgcccggcaaaacaattttcggctccaatgcaaagaccatacccggctccaactcctgcttcatacgcggagccaataccggcatttcattgatttccaaaccgatgccatgaccgataaacttggccttttgagtggctcccataaagttgtcggcaaagcctgctttggtgacaatatcgatagcgagattgtaaaggtcctcacaaacagcacccggtttcgctttttctacaacagcctcttgtatgtccaggcaaacttgatgggcaacatatgccttttccggcagctttccgatagagaatacacggctcatgtctcccatatagccatagaagttaccccccatatcaaccataaagctctgaccgggctgcaacagtgcaccgttcacactgataggcagtgacgggtcaagtccctcgcctcccagagcaaaatcatagggggcaggcgcagtggcattgtctcctgccagcagacttcccataaaaatctccatactttgtccgaaggtacgaaaaatacccagacaaccttccagacgcatcaggcgctctatttcgatggataactggcggtctgtcattcctggtctataaaccgagggtatttgttcgtaagctttagcatgtgcaatgccggaacgacggaacatctcaatctctatttcagtcttgacacttcgggccttccggataagtgccgtaccacaaggaagcacctccgtttcagggaaacacgcagccaaacggttatattccgtaaaagacaactcatccccctccagcatcaacctcgcaggtatgggcaaaccacattcctttagtaagtcaggcagttgttccggtttacggataggatgaatatgttccccttcaatattgttaggacgtttgatgaataaacgggcgggagcattcaacggcagatacaagtaaccgctgacgacacgtccgtacgtatagattaagtttacattgcaagcgataagagcggcatcaatctcttgttgagccatgagagagcgtattttatcacgtctcagtttcaattcaggtagtaacatttatatatttatgatttatagatttatgatttcattgcatacgacagcttttaaagtattacccgcatcttttacgaagcgcaaagatacaattatcgcctcataaatcataaatcataaatgataaatcataaatctataaatcataaaaaaagtactgccccataccttcacaggcgtagggcagcacaaaccacaaatacaaatacaactaaacaaagtttctctcttagataattccctgacccatcatggcatgagccaccttcatgaagccggcgatattcgctcccttcacgtagttgatgtagccatcaggttctgtcccatattttacgcattgagcatgaattccgtgcatgatggcgtggagtttttcatccacttcggctgcactccagctgaggtgcatggcgttctgcgacatttccagtccgctggtagccacaccacctgcattgacagccttacccggtgcatacataatcttgttgtcaatgaaaaggtcgatagcttcgggcgtacatcccatattggagatttcgcctacacatgtcaccttgttgtcaatgaggtgttgtgcatcttcgccgttcagctcgttctgggtagcgcaaggcagagcgatgtccgctttcacttcccacgggcgtttgcctgccacgaaagtagagccggggaattcgtcggcatacggtgctacgatatcgttgcccgatgaccggagttccagcatataatctatcttttcgccactgataccgttcgggtcgtaaatgtaaccgtcgggaccggagatggtaaccaccttggcacccaattcggtagccttggtagcagcaccccaagccacatttccaaaaccggagatagccacggtcttgcccttgatgtcaatgccttttgtctgtaacatttggtttacgaaatacaagccaccaaatcctgttgcttcaggacgaatcagcgaaccgccaaattccaatcctttaccggtaaatgtgcccgtaaattcgcgagtcaacttcttatacataccgaacatatagcccacttcgcgaccgcctacaccgatatcaccggcaggaacatccatatccggaccgaggtgacgccacaattccagcatgaaggcctgacagaaacgcatgatttcagcatcgctctttccgcgcggagagaagtcggaaccacccttaccaccgcccataggcaatgtagtcaaagcattcttgaaagtctgctcaaatcccaggaatttgaggatagaaagatttacggaagcatggaaacgaataccgcctttgtacgggccaatggcattgttgaactgcacacgatagccgaggttcgtctgaacttcacccttatcatccacccacgttacacggaaagtaaagatacggtcaggttcaaccagacgttctataattttcactttctcgaactcgggatgttggttatagatatcttcgatggaaagaagaacttcctttacggcttgaagatactcagactcgccggggtgctttgcctctaaagaggtcatgatacgttcgatattcataatattacgttttaaaggttattaccttgttgactttacgctattcaaacaaaatgtcaatgaataacaccgcaaatataagaaaacttttcaaaacagctaaattttacggttatattttgattaaagaatgataaaatgtcaaatccccggcattctctattcatacctaaatggtctattcttttcctattctgtcaacaattcgccataacggcataaatatagaaaaattataataaagcaaataagaaatgacgaataatttacgaaaaaagacacaatcctcacggactatgcctttccaattgctaactttaattcttaaatgcttgtattaaatccgcaacataataattactatgtacggacaagcttcataatttcttcaatccttttacctcttcttttgttgcttctcgaacactgatagccacccctccactacttgccaaaggttgacgcagcacactctttgacgttactatgccacgacggatgtcatagctctgcggattatctttccagtctgcatcccgaccatctgcataaacggtaacaatatatttccttccttcgggtaagaaagagaaaggaatagttgccgtacgaggatgttcgtcggtaatagcacctacataccactcttgttttcctttggcttgacgagccactgtgatataatcacccggttcggcttccaaataccaagaattgctccaatccaccgctacatccttaataaattgaaacgcatcgggaaaacggcgataattatccggcaggtctgctgccatctgtaacggagagggcatcgttacatatagagccaattgttttaccaatgtagtacccgcctgacctttaggtttcgaactattataatacgaaagttttgtctggaaaataccaggagtgtaatccatcggaccacccttcaaccgagtaaacggcaagatacaagtatgatccggatcattgccccccatagattcaaactcaccaccacgggcagattcttgcgctacccagttgggccaggtccgacacaagccggtgggacgaacagcctcgtgactatctaccataatcttataatcagcagcacgcttcaccacatgtatataatgattgttcatccattgtgaggaatgatattcactacggggaatgattgagcccacatatcctgtctttacagaattatagccattatctaccataaattgaaaggctacatccagctgccgctcataatcggcagcattagcagccgtctcatgatgcatgataatctttaccccctttgatttggcataggcatgtagtaccgcaacatcaaagtccggataaggtttgtcaaaaaggaactgacgatccttacgataggatacccaatcttcccaaccttcattccaaccctcaaccaataccgcatcaataccattctccgccgcaaagtctatgtactctttcacatgttcagtattggccggatgatgtccattaggagttaactttgaatagtcggttatgccgggtttagccttataatagtcgctatatgcccatgtacctcctccaccagtaaacatctcccaccagacaccgataaatttctgtggcttaatccaagaagtatcttccagcttacaaggttcattcagattaagaatcaactgagaagcaaggatgctacgtgcatcgtcactaaccataattgtacgccacggggtatgcaacggtaattgcagatatcctttctttcctaatttatcgggagtaagatgagcagaaaagttaaactctttatcatccacattcagcaacatggcagaataatctaccaaggcagcttcatgaatattgatataaagtccttcggtagtctttatcataaggggtgtttgtactgtgaatgaagtcgctttagcttcatatccttttttacgtagattacgttccatagcttcgcgcacttcggaaatggccgcagtagtataggcaaactcattcgtatcataatcaccgggaatgcaatagagtgtatgattaccggtcagattgaattccgtcagttcgtcttttaccgtcagataattcatgtttttttgctccggcaactcataacggaatccgagtccatcgtcaaacaatcgaaaacgtacaatcatcgtacggtcgtactttgccggttgtgagagagtgacagtaaattcattgtaatggttacggactttttcatactctccccatacaggcatccaagtttcatcaaaagtagaatttgttgcatcaagaatccggaagccatttgacaaatccgcttcttccataagtattcccaaggcagaaggttctacaaccggctctcctttgtaatataagctatagaccggccccccctcggaatcaagcacaacattgagtttcagattcccattgggagataacaattcgtgtgccatcgccacacaagcaattcccagaaatacaactgttaataatacatgtttcatatacatccgttattgttgatatataaaatattgataaggctccatcgtcattactgtaggcaactccacatccacaccggcaatcacatcggtcatggtcttgccagcatgctccataggtactttcacttgtacagactcattggcggtattcaccatgaccaacatgccatgactgcctgctgcccgataaaatgaagcgacatctccggtagtataaacttccagttcaccaccacgtacactgctcgtagctttataggctctgatgatttctgccatctcttgcgcaaagacttcattggacttcaagtctataactccgtaattgaaaaagttaagtgaccgcggataggctacttcctgcgaactataaataagaggtatcccctcgagcatagtcgttaatacaaaagcagacatggcaccacgctcaccgccataacattctatcggtgatgcctcacttgcctggtcatgattagtagaatagcgtaaccgtaacgtacccttcggcattccctccaattcggaagtattcatagcataaaggtcagtaagtgagcatttaccggcataatagtctttcagtttactatggaagttccagccgtagagcagattgaaaccattgttcattaaagacgtttttccgccttcggcaagcatcagcaaattattgtcaagtgtacggagctcggcgattgctttcttccagaaagcatctggtaccccctcggcataatcacaacggtatccatcaataccaatttctgttacccaatacttcatggcatcaatcatggcttgctgcatggtttcgttgtcaaaattcaagtcagcaacatccgcccaaggctgttcttgaggttgtaccacattgccatttgcatcctgtgtataccaatccggatgctcagtcacccaagcattgtcccacgaagtatggttggcaacccagtcaagaatcactttcattcctttggcatgggcagcatctaccagttctttcaagtctttttttgttccgtaacgtgtattcagctttttataatcctttatacaataaggtgaattcacacttttcagtactcccggctcatttacaggcatcagccaaagcacggtagtccccaggctttgaatacggtcaagctctgctttgatggcagagaacgcattttcttcggcaaaaatgcggggatttgcctcataaatcaccatatccgaagccatgtattcttcctgtgggacgggaatcggttccatgtcactctgactatcactacaccccatacaagaatgtagcatcgtaaagagcagtgtcgcaattattacttttttcatatttctactttttatctatacttatactcattggcggaactgatatctgcaaaaggagcatccaaactctccagtaatgggcattggcagaaaagatactaagccttaatactaaaaatcccggaagccaatactaaaaaacaaaagagctaagagataacttcttcccaaggcttggtttttctatcccaagacttgggatagaaaaaccaagccttgggacatatatccgcaagattgaaaagagatatcctatccccaatctcattccaccaataggtcatttaacatcttcattactatacaaaactcatttcaagaaattattctgattaggaacaaaagccgcttcagattccggttcagagtctccgtccggattgttagggtcaatctcctcaccagctatgtccgtaatacggaaataataatctcgatcaagcgtcactgctgcgaggtcaaattgtgagcctccattgttattattcattatcagattgtaagtcaatcccttatttgcttcacctgtatcgtaataattatacgtgacaccttttatctcaacactaccggttggtaatattcctggccaactgccaaagagttccggtatatcatttccccacgcatatatggttgtttctgcccatccggactggtcttcaataaaaatggtataaccatcatggatgaccactgcatccggatctatttccgtccaaccgctttctgtgatttccaaatatatgtcacggtcaagagtaaagttctgtggtccatcaaattgtgaacctactccattatcgttaaatatcaaattgtaaaccaatcccttatttgcttcacctgtatcgaagtatttataggtaattccttttatctcaacgctaccagtaggtgaaataccgggccaacctccaaaaagttccggcaaatcatttccccacgcataaagtgtcagtgcatcccaacctgtattgtccatcacgaacacagcataaccgtcgtgggtcacttcacttgggtcttccggctcctcaaaataagcattccagcgggttaccgttatatcagtgcgagtacctaccttagccgaaatttgatgtaaagcatccccattctgcaaagtacgctctataccttgtgtcttagaaacgaaataaaagccatcggcaagtgtctttccattaacaaaatcttccggatagaggtatatgccccatttaacatcattgtttgcagctttctccatctgccacttaaggtctccggaagcagcatcctgacctccattgaaatcgcctgcaatataaattatttcatcggcaccagttccttggggcataatcacctccagcaagatagcatcgctacgaagttcaaattgcggcaactcatggtcaaacacaatttcctccttgtcacaactactgatgaaagctacaaaaagcaacaaaagccatagcggattacatatatattttttcattgttactattattataggatgattaataattaggattctgtaccagtcccggatttaccataagggcagactggggcaagggataccactcgtatttgcggtcacgtttagccggatagcttaaaccgtcgtccgtggcacggccaaagaaccaccattgcccttgcgtaaacttatcgaaacgacgcaagtctgtacgacgacgacgcccctctcccaagaattcaagtccccattcactcaacatccaatccatatcaaaggatgtaaaaccaggaccgggctgttcgagagccgatttatctgtaaaatagcgtgttttaactctatataccagctctttagcaccttctgtatcacctgcacgcattttacattcagcaagagtatagaccacttcactcaaacggaattccacctcatcgatgttttggaaatcaatgcctgcactctccggataaaccggatatcttaccaaacggacacctgaattcgtttcaccccagcgaggtgacatgacagtctccagattacgtcctaaattaaggaatgtacccacttgatccacataaaccaaatcctgaccgtcacggtcggcatctgctttcaaagccgcacccttaccatagttggctttaatagcccctttcaaaaaaatgccttgatagtttcctgttgtttcattatacacatagttctgcttacggatatctttatcgtggaaacgttcataaactgctcctaacttatcaccgtagtcggtaagaaagctcttaggattgtcagtaccaccatacggctgtacatttccagaattatcccatgaaggtgccaagcatacacaattccatccgctctggctgtatgtacctccaaagtaatcccaacaattgtaaggcatgaaaggcatgttacgcatccaaccggtattgacctgaccgacttccatcgccaatgccattacaacttccggacattctacattgtttatcgaataaatatcacgatagtcatcggtaatgctgtaagtaccataatcgccattcagaattttttggcaaagagtggcacactcattataactgttttgtttgataaacacctcagaattcagcaacaagcgcatcttaatcatacgattggcagcttggttcatgcggttgcgagtctttccagaaccatcttctttcataagatctgtaactgactcatctaattcctgactgataaaatcgtagataatcttgcaccccttatcaaaatcagtatctgcagaaccagggatttccgcacccgaagaaatgttcaagggaagtgctccaccccaaatctcaaagatattgtagtatgcccaagcacgcagggtacgtacttcggcaatataactattcaaagcatcctcagtcatgcgtatagatgcggggctgattgcctgcaaatctgtaataagcgtattgcaaagcccaatagtggtccacgcattctcccaagtttggcgaataatggttgattctgacgtccaggtatgtgaagacaaagcaaacttcaatgcctcatcccatccccaaagtccaccgttccaactgcgccatgccacctggtcggcagaaaactcctgcaaataccagaagtattccaaataactatatgcagctttcgaatagatggctgccactgccccctgaacactcgtctcatcttgataataaattccggcatccacacgatcgaacacttcctcgtccaaattagtacaagagaaaagtgaacatgacataatcatcgccaataaccaacgacattttatatatttcatatctttcatatttttaataatttgtttctcatttatttgaagcgaagagtcacacctaaactcaattgagttgctgtaggataagcactattactatctactcccggctggataccattcacgtctataattgaagggtcattaccagaatatccggtcaaggtaaacagattcttggcagacagatatatgcgcatattatccagtaacttacggttcttaggagtaaaattatatcccaaggttacattttccagttttatgaagctaccatcctccaggaaataggaagatattactccaccaccggtacggatattcttatcttccagatacgcagagcgaagaacattatctgtaccacatccctgaagccccataccatatttacgcatattgaatacatcaaaaccgaatgtaccgcggaagaatacactcaaatcaaaatttctccaagtcaggttgttactccaagacaagaagtgcttgggagcaccattgccaatataacgtttatacttggcatcagcctgagaaatcggtatttgctcatctttatcattcaaaataagcatattgccattttcgtcaacacctgcatattcataaccgtagaactgccctatctctcccccttcctgcacacggaagaaatattcgctggagccagtacccggttttaagtaaaggtcgagataagatgccttgtaaatatcgttagaaagtttggtcaacttagtcttcccataagaataattgattccgctcgtccacttcactgctgttttagtaaggatgtcaccatccaaagatacttctataccggtatttttcgttgttccaacgttaaccaaaatagtggaatagacaaaaggcggttgaggtgccgtgtacgtataaagcaagtctttagaactacggtcaaaatactccactgaaccacgtaaacgattccatagaacaaaatcaacacccagattaatcgcaacgctcttttcccaagccaaatccggattagcattactagagggagcatagcccgttacccaacgcccgtcaaagagataactaccattggtattgtaagtagaaagtgatttataagcatcaaaatccgaacgaccggtaattccgaaagaaacacgcggtttcaaactggtcaacactttccgggtattcttcataaagcccatctccatcatttcccaagccaaagaagctgctgggaagtacccccacttttggttagcaccaaatttggaagagccttcatagcgcaacgaagccgatgcaaaaagcatatccttccaattatagttcaaccgaccaaagaagccaataagtgtcgattcagagcgaccgctatataaacttgccaaaccatccttcagataagagccactgcccaaatcccaatatttcgtattatcaaaagagaagtcgttgttactaccaccaatctgttcccagatagacttctcataagtatagcccactacagccttaatattgtggtcgcccaagttcagtgcataatttcccaaccactccaatcgattggtgtaccatttctgatacttcatttccgcacgtcctttataaccattccaataggactccgaaccggcagacgaagcataatattgttgcttcatgtcattgtaatgcaatgagtaacttaatgttgtattcaacaaatgcttttctgtctgcaaaatattcagtttagcctcagccgtacccaacaaatacatacgctggccgttgttatctctcaaagcaagctccgcaaccggattggttgcacccgtaggagaagtaggctgataatacgaaccgtctgcattatataccggcattgtaggattcattgtgagtgccctatcgaagaaaccatcatttccccaggtttcatttacacgacgtgcactcaacgaaccgttgaattgtaagcgattctccagtacacgctgttccatagaaaaacgacctccaaattcttcacgaccactcacgatgtcaagtccattggcacttttgtaattgaaggaagcaccatagaaaccattctttgtgctaccatcaatagatatatattggtttgtgtcgtatgctacatcacgagtaatcagtccataccagtcagtgtcggctccatagtctgtacctcgtctcgaacgacggaattcatcagccgacagaatatccggagagggcttggctacattaaaagcgatgtaactgtcatatgtgactaccgtttttccagcttcacccgagccacgtttcgttgtaactaaaatcacaccattagcacctcgcgttccgtaaatagcagctgaacccgcatctttcaataccgtaatagattcaatatcctgtgcagcgatgttacggatatcgccacctgccacaccatctatgacaatcaaaggactattacttgcagaaacagatgttgcaccacgtacttgtaatgaagaactggagttaggattggcagctgcctgcgtattgacattcaagcccgcgacttttcccgataccatttccatcgggttattcatagcccccaaattaaaatttttcttatccacttgtacaatggaactggaaacttcttttttactcaatgaaccgtaacccactactacaacttcttccaacacctgctggtcatcatgcaagacaacatcaatcttgtttctaccggatacgttcagttcctgcgtttggtaacctacataagaaaaaataagtattgcatcaggattgacattcaataacacatagttaccgtcaatgtcagttatcacccccgaagttgtaccctttaccaatacacttgcaccgataagaccttcacccgttgcatcggtcacctttccttgtacctgaagttgttgcgcaacagcaacaccagtcatcataagaaaacccagtaaaaggatcatgcgctttttaaggcatctctttagacttttctttttcatcttattagaaattagttaaacaataaatagattgatgcaaatgtattatcaaaacaaacgcacgatttgggctgagataaaaatctaaagtcctgcaacaggcaatcaactataatacaacgcattacgaaaatgctattgctactaatttctaaatcatttctagactttttaaggcagaagaaagcctcaaaaggaggataaaatcaaaaagaagttattttcatcactcgttcttcaaagtcctctttacaaagagacttgttttttagcttggaacgataagtatagatggtagttatggaataacgcaaaaattctgcaatacgcgcactgtctgtaatacctaaacgaatcagtgcaaatatgcgcagttcggtaacaagcaattcttcatttttaggatgcaattgttcttcaactggcaacaaacgattaaattcttctacaaagttagggaatatcttaagaaaagatacatcgaaattgtgatagaactctttcaactcttgatttatgaaacggtcggacttcaatgtacgatataactcctcaagtttaccggcagcagcctgcttgttcaatatgcggcgatattcttccatcttacttatataagaggaacttaaactgaggaaacgtcccaaatactcttccttaatatgattggcttccgtaagagtctgattagtatgcaataatcgttcattagcctcatgttgagacttgttcagcttcttcaattcactattcaatatactcaattgggaattggcagcaacaacttttttacgggcataagacaattttttcatttgccatagcacacacagtactgtcaatagaaggaaaacagaaaggatacatatgcctgtaataaacattctctgccgctgttgctgtatttccttttcttgctgataagcacgatctatgagcggaagcatcttggaattctgcgaactacgcaaccgagtagtataataattagcatcttccatactaatcttgatatagtgattagcacgttccaaatcgcccattccataaagtaattccgctaatgcgcacaaagaataattttctttcaccactgccctaatgtcagcaatggcactgctaatacgtgcttccatttctttttgcttgttccccacgacatgataagcaaaagccagaattgaagtagctactgcatactcacgcgtattggatttcaaccgaggtaaaaaattcttcaataaacatatagcctcctgactttttccctggtcaatgagctgaggtgcatgcacgactacatatctataagtatcttccggtactaggctgattatagaatccctatacaaatttgctatccgaagataattgttcacgtagttccgatcagtggcgtactctgcctgatagagatataggttttcaaaacatacataatagtccactatattttcaccctccaacgtgttacgaggaagcgatttcagcaattccattgcttcaacaaaaaggcccgaagtatttagaatatgtactttatttaatatagaactatttatccattgcctattatttagccgtgtggcaataagaatattttcatttatcctcaaatccgcaactacgcgcctaatatgatacagaagcgaaaagaatctgcatcgttagtaaaaagggggcacagtgcatcgaatgtcaccataaagacatataaatgccccttaccccaccatgcgacttgaggcaatacgcaaaatcacgactataagttgtcggtgttatccaaagtcattctggaacacattggcataagcattgttgcatgaatagatattcagcacatacttccttgatgtcctgacccatttggctggcacagagatgaacttaaagacaaacgtcttgatgcggcttgttgctttgagtccgaacctcttcacgtcaagcctcgccatgatgaatttatagaagttgcgtatgagtgccataagcagaagaaacaccgtgttttctcccataaaggattttggaagcctgttccagccgaatccgttattcatatcatcgaagatgcgttccttccctccacggaggttatagaattcgacaatctctttctcggaagactcgtagtcatttgtaaggatgcagcggtaggtgtattctccttcccacaggtcgagttcgccgtctatccgcttctgtctttgaatcacaagacggtatgccttccctttccatttctcgatgagaatggaggccagctcaaactcaatgccgcccaattccactttcttccaacctctgagggcaaagatgtcattgtagagcgaactgcatcggttagcacggatatagaaggtcttgcagtgtttagcaatctcttccactatctcttcagaacacgagccgcaatcagctctgaaacggttgataataagcttgttttgttcaaacctttcaaagaacctcttcagcgtgtccttctggtggaaacggacatttgtgttgccgtcgctgttctcaatgccgacaatcaagttgccaataaccgccacgccagggcgataaccaaggaacttcttgtatgtaggcttcgcatcaaacttctcagcctctatgaactggtggtcgaagtcaacgtcatacccctcgccctctttcagctgccctgtggacaataggcaattgaggagcagtgtattcagcttgtctgccgtgttgaagtcgtaggtcttgccagtgtcggatgtgtaggaaatgttatcctgggtcagttcctttatggctctaagaatcgtgtcggcactgcatgtgcgaagtgtcggatgaagcgaaaggtggtacatcagatgagtggtgacatcctcgatgcatgagccgccacaaaaataaacgctcataagcgaacggatgatttcgctgtattgataaccatacagcctgcatctcataccgagggttgagtcgattacagatgagagtctggagtcaaattgctccattattgaaaatattcctccaaaaggagtgagtttctcggatttaattgctacctttgccatgtctgtcgggtttgatacatattttgatttgcaacactaagataggtgaaaaatctgacatggcaaattcctgagcaactttttgttgctcaggtacttaaaaagttatatttgtaatagtgttgcggaattaaggtttatataatgtaatgcagaatcactaatataagaattatattcggcaaaaagacgattttgtatcagataacgctccatgtcagtaagcctcccttgcttcaactcatcctttatcaaagaaatataccgttctttttcttcctcgtattgtctacgcattacgatagtcttatccagaacagacaaaaggctatctattgcagatgcatacataccaagcgaacatggcaacagcattattattaaaatcaagatacgcatcataggttaacattgtgacataacttcgcaaagttacaattttcttctgttatgaaaatacgattttagtattttctttggcattataagtcgtacatcatagggattatacatctaccgaaattcatatttcctctacttcggatagcttttaaagcttttatggcagttttcaaacctccttctgcctaataatggctaacattgcaaccgaaaccaaaggttgacatcaacatgagaaagacattattatttttataccttttatctctcggcagtattgccgcatacggtcagacacgtctgacccaagaccccaaactggaacgacaactccacgaaagcggactgatacatcaacccctccccctggatattgaaaactctttcgaaaccaacggatggaaaaaggaggtcttgcaaagcgctcctctcacccgctcggcaggtacagagggatggagtcattccggcgcaggaagcatgtccttcagtacggaaaagaccgtttccggcaaaggcagcatcaaactgcaattccccacattcaccgggaaaagggcgaccggctctccttccgacccagactatgccacctacggaaacagcagtgttacctatcatctagacggcgccaatctggagaagtacaaccgcatcgtattctccatctatcccgattgcgacggcgcgcgcatcgtcaacatgaacctcacgtttcgcaatgcagatactcctgccaagaaaggatataatcagccttcgggttcacacctcattaaccttattaataaggagtggaaccaatgtttcctcgaaatagacgagtatcagcgcgacaaggtgatgtccatcaccttcagcacagccctcaaaggcaaagaccggactacaggagattcagctatctactacctggacaatctacaactgcaaacggtgaaagcccctgagaaagtcagcggatggatacctgccgatggaaaaatctcctactcgacaaccggctatgccgtcaaccaccccaaaaccgccctcatcaacacaaacctcaccatagacgccggaaagcgcttccaactgcttaccccaaccggagaaatagcttacgaaggagacatccgaaaagagaaaaccactctcggagaatttggccttattgatttcacctccttcaataatcccggagagtatctgctgaaggtcggaacatcgctaactcccaccttccggattggagaaagactttgggaagattcacaatggaaagtactgaacttcatcttctgccagcgctgtggacatccggttcccggcaagcattccacctgccacgtagacctcatgtcccgacatgacggacgcagcatctcctactccggcggatggcacgatgcaggagacttgtcccagcaaaccttgcagacgggagacgtgacctttgctctgctcgaagcctataataaacaaagaaatatcaacccaaccctcgccgcccgcctgcgtgaagaggcggaatggggagtagagttcatcctaaagaaccgctacggcgatggttaccgcgccagcagcatgggattgcttatctggcaagacggtgtgttcaatacattggacgacatatcttccgtacgtgtacagaacatggcatttgacaactttctctatgccggatacgaagcttacgcctccatgacgctggacaacgacccgatgctgcaggaatacctattgcgcgtggccgaagaagatttcgcttttgctatggagaagttcaaaaaagatggcttcgaccagttcgtccagccttacgaacacagttacaacacttcgaaaagtcagtatatggctaccatctcctggtcggcaagccaattatacaagctgaccggaaaaccttcttatgcggacatcgccgccgaatacatccgctacaccctcgactgccagcgcacggaaccgctgaaagacaaagacgggacacgcggattcttctaccgggacaaatcccgcaaatccatcgtacattacatacaccagtcgcgcgagcaggtctatatgcaggccatggtgatgctttgcgaaacccagaaggagcaccccgattatcctaaatgggtgaattccatacaactatatggagagtatctgaaaggaatgatgaagtatacccatccctacggtatgattccaagcggtgtttaccatgcagaggaatataaggataccaccaacttctacgccctccatctgtttccccctgccaatgccaaggaactgtacacggaacagattaaacgaggagtacaactggacaaagagcactacatgaaacgtttccccgtgtggttcaacattttcaacggcaataccgccatccatctttccaacggaaagtccgccgccatctgcggaaacttcctgaaggacaaggaactgctcaacatcggtctggaacagttgtactggaccgtaggcaagaatcctttcggacaatccttgatttatggagaaggacacaactatccgcaactgaacaccttctcttcgggagaaatgacaggagagatgcccgtcggtatccgtaccctgggcaacgacgatgtcccctattggccgcaaaccaacaatgcctgttataaagaggtatgggttacctcggcaggcaaatggctgtctctgattgcggaatattagataatgaagaattaataacttataaattacaaattatgaaacatctgcttattttattgtttacggcttgcaccctgctgacgtacgcacaagtccccgaaggttatccggcaaactatgccaaagctcctcgcttcaaggccttggtttattacacgcaacatgcggaagaagcacacgtacaatttgcagaacaagcaaccactttcttcaagaagctcaattacggtgacggctttgttctggatattactaccgatttttcaaaatacccatacgagaaactgaaagaatacaatgtcattatcatgcttaacacatcccccaacaccaaggccgaacgcgatgcttttgagcaatacatggaaaacggaggcggttgggtaggtttccacgcagcagcctacaacgacaaaaacacgcattggccctggttcgttaagtttcttggtggtggggtgttctattgcaacaactggcctccccagccggtattggtcgaagtcgacaacgaagaacatcccgttaccaagaatctgcctgcatcattcgtggctcccgccagcgaatggtaccaatggactcccagccctcgccagaacaaggacgtagaagtgctcttgtccctatctcccaagaactatccactgggtatcaaggatgtagtgaattttggtgacttccccatcgtatggtccaacaagaattacagaatgatttacctgaatatggggcatggtgacgaagagtttatcgacggtacacagaacctgctattggttaatgctttccgctgggtagtgagcaaagacaaaagcggcaacccgttcctcaaataaaacggtttccataacagcaatcaagagaataaataggggataattcccctatttcctatgttaacactacgtttttatgccgaaacagatacttttcgaaggaaaagtatctgtttcggtcgttttatatagatacccttgccagttcccaacgggccgaaatgacagtttcatatcgttgaaaccaaaagtttcacttgctgaaacttttagttttacgaaaggaaactaaaggtttcccttaatgaaaccaattattttcccaattaaaacttctcgtatttagcctcaaaactaaaagtttcatgctgagaactaagataatagccacttttacgatttacccaataaataggaggcatcatcttttagaaagattggaaagcgtgatagatggttgtaacgttttttatctgtcacgggtatctatcacgatttaattgatttataatcaaaacaatacacccatttgcgtgatagcatgacagatattttgccaaaacaaactttgtgaaggaacaaaaaatccccggtattattcacaaggaaataccggggactcttcagaaaaaaacaatcaaaacttataaccagccagggttctgtgtcaagccacctttagccctatccatttccgactggtcaatcgggaagtacctaaacttctccgtccaacctttgttacctaaaatctctgttcctttatcgaaacgcagaatgtcaaaccaacgctgcatttcatccataaactcatacccacgctcttcaaaaagaatatccaacaactcctgcttgctctttcccgccaagttgatacgatgctctttgtctttgaaagcgcggtctctgacctggtcgaaccagccttgcgcatcggcactggcagttccgttgatgcgtacatcaagctccacagccagcagcaaaacatcggcataacggtaaatacgccaagagttataatagttatccgtagggttcaccgtagacgtcgtctcctttctcggatgaatcttatagtgccccaggccttcgtaattttcctgctggtcactgacttggaaagcacttcctgccggcagttcacctttggccaccatttctgccactttcttagcctcgtccgcatagacaatgactgttccttctcggcgcgtatcgccttccttaaacatgttgtaaacggaactcggcatggtattctgcccataaccttcgcccaatccgccctgctcggcacttctcgggtcaacaatgttacgaccacccaaagaacgtgcaagcccaaacccttcgccggagttattgccggcataacatacctcaaagatagattccgcacaccattctccgtctttcacccataagttctgataatcagggttcaactggtatcttccactggtgattatttctttcatgtcattcaatgccacctgatatttagtctcatcacgatggaacaaaataattttggcacgaagcagcttggcagcatcccggcaaacgcgtccctgctgtgtagcactgcgctggggcagatacttagtcacttcgtcatccaagtcacccatcataaactcataaatctcttcacgggttcctttggcaacgctatacatttcactggttgccagataatgtttgataagcgggaattgctcataccccataaacagatggtaatagaaaatggcacggtaaaagcgcgcttcggcagaaatggaattgacaaagtctgcattgaggttgcacccggccaatttgtcaatcaacagattggcagcaatgaccccattgaacaagccgaaatcccactcattccaccaagaaccatagccccatgcaccgaaacaagaagtcgcgtcataggtaaaagtatcccatttcgtcttgtaagatccctcaccgataccaccaccggtttcagactcatcgcccagcaaagaagagtaagaccaaacctccggcatacgggtctgcatttcattcatcacggcatacaagcccttcatcatatcgtcttccgtcttatagaattcggtttccgacacctgagttctcggattcacttccagaaaatctgaacaagctgtggtcgacaaagccatcgcacccaaagccaatacctttaatatcttattcattgtatctaatttttaggttaatcaaaatgtaatattcgcaccgatagtataagtacgtgcttgcggatatgttcccccgtcaaatccatcacgtgttcccacttcaggatcataaccgctgtagttggtaattgtaaacagattttcgccctgcacaaagaaacgcagccccttgacaccgacacgctgcaacatctgtccgggcagactatagccaatctgcaacactttcaaacgcatatacgaaccatcttccacaaaaaagtttgaaacctgatagttattgttgtcaccatctatcacacgtggcacccaattggaagtgccttcaccatgccaacggttcagccaagatttgtcgtagttaccaaaagtcacattggaacgtctgtacagtttataaatgtcgtttccgatacttccctggaagaatgcactgaaatcaaatcctttccaatcggcagaaagagtgaatccatatgtccagtcagggttcggcttgcctatcatggtacggtcatcaccattcaacccattttcaccatccaaatctttaaaacgaatatctccaggcttggcattcggctgtatcagctgagtctttccgttagaatctacgtaggtatagctatctatctcctgctgattctggaaaataccatcatgcaagtaaccgtagaagaagccgtacggacgcccgttctctctccaactgacctggccgcccataccaccgccgatattattgagaccgacacggtcggggccctgatctgttacggtattcttcacataagaagcatttccattgatacccagattcacttcacccaccttaaagcgataggacgcttcgaactcgataccttcgttcttcactgtacccgaattgaccgtcatactgccataactggtataaagaggaatcggcatggaaagcagcatgtccttcgtcttcttcacgaaatagtcggcagagaatgtcaatgcactgttgaagaaacgcaagtcaatacccaagtcggtctgttcggaggtctcccatttcaagtctgcattggcatagccactgggcagcatacctgtatatacctttccatttatgactgcattcttaccctggctcatcatacttgtataggcaaaggagccaatacgttcgttaccgttctgtccccagctcagacgtatcttggcaaaatccaaccaggaaggtctgttttccatgaacttctcacgagtcaacacccaacccaaagaaaccgaagggaatgtagcatattggtgctcgcgactgaagtttgacgaaccgtcccgtctcactaccgcttcgaacaaatacttttcatcataattataattgatacgtccgaatacggatgcaatgcggtggtcttctgccccaccccatactttggactgctcttcgggcgctgtggccgtgtctatatatcccttgtctatatccaccaccagcagattataatcttccgcttccaaattggagtaatggtaggaagacatacttgtaccgaacagtgcacctatattatgacggccgaaagactttgtatacgacagtacattttcccactgccaataggaagacccccttttcttatcctctactttggaagtagcattcttactggtagcattcagctcgtagaccggagttacattcttgatggaattgaatacccattccgcaccataggtagtcttgaacttcaagcccggcaacaagtcgacatcaaggttaaagttcgcaccgaaattctgcggcatagtcctctggttatgactgacctgcatggctgccagcggattggttatttcacgcatctcgatgatattgtatgccaggccgttgggagcaatgacatgatttggataagttacggcatattgctccagtatagcagggtcggtctgataaaccggctcggtaggaggcaacatattcatggaagtaatcaagcctgctgcttcactattgccaatagtattaccagtctggattgacttggaatagcttgcaattgcaccaaaactaatcttattcaaccaatttcgtgatttcgtgtccagtaatacattattgtaattcaagcgtacattgtagcgttcataatcagcatgtcctttagcataaataccttcttgctttacataaccgaaagaagcataataggtagagttgtccgtaccgccactcaacgaaaccttgtggttcataataggagcattcttgttctgcagttccttttgccagtcggtattgacgctggaaacagtcgggaaataagggtccttacctgcattggcagccatttcattcatcaacatctgataatccgcactacccagcaaatccaccttcttggaaggattctgaataccgtacgtaaattcatagttcaaagtagcctttcctttagtacccttcttcgtagtaatcagtacaacaccattagcaccacgggctccgtaaatagcggcggaagctgcgtctttcaacacttcaatagactcaatatcagaaggattcaaatgactgataccactttcagacggcatgccgtctactatataaagcggatcggagttgttgaccgtaccggtaccccgaatacgaatctttgattccgcaccgggctgacctgaattagagataatctgtacaccggaaactttacctttcaaggcattctgaatatttgtaggattacctttatccaactcttcactggtaacacggctcacagcagacgaaagtacactcttcttttgtacaccatagcctactacaactacctcgtccagcaactcagaagaatcagtaaaacggactttcagatttgtatctgcagcagtcagtttatactcaataggctcataaccgataaaagtgaagaccaacacatcacccacagaagctttcaggctgaaattcccatcaatgtccgtcacagtacccacagccggattacttttcatactgacattagcacccggaaccgtttctccggaaggatcataaacgataccctgcacattaatttgttgtgcgaagagctgcaaagtgcaactgagaatgcaaagcagcaaaaggactctttttcttttcatgataatagtattagtttataaaatagaaagttattcatattgtattgatacaaattccaatacttcgataagcgaaattacgtactaaacaagaaatggaagttgaatatttctcataaggagttcatttactaacacatccataaaaaacgttttattttaaacttaaagtgataaagtttaaacccataaaaaaacggatacgtttctgtacgtacccgttttcttccaaatccattgattataaagaggattacctttctaaagtccagttaatggcatttctgaacatggtcgtaaacccttccgtttcgtacaatttgctgctatgccctatctggaaataaacattgcgtgcctttttgctttcattgacccaaaccaccggatgatcgcccatcttgatgtccgatgcaggcgtgtagctcgattcgtctacattggccagtacatgtacattggggcgcgggctcttgtcataagtataccactcgtcatcgggcaccacgaaagaggccggaacatccttcattaccggatgctgtttatcttccacaatcagcgtaccgtcggccagcggagctatgtagttcttgaaacgtacaccacccatgaaatcagagaaccattgccacatgggataaccgtcaaactcgcccagcaaagtagcatgatggaaaccgatccagccgccacggccttcttctatatacttgacgaatgcatcttccgcttccttcggccaagtataaggcgggaaatccaattgaataaccaagctgaactgcgacaagtaagcctccgttatgttcctggcattgtttatctcggtaatactgaaattcccctttacaccttcggccgccaaccacttcaagccggcatctgtaaatcctccgtgctgtccaccacgttccgtcaacaccagtaccttcgccttgtgcggcttgcccaataggttttctgctaccgtacggcgcaaatcaccctgctcattgtctccgctataatcccaatacatgcctcccagcaaatctttatccagaatatactgacacttgatggcaagtgaacggggattctcaaaaccaaataccaacgtatcattcttatcggccagataaggcacttgagccacctcatcccacttttcagtatattgggtatccgtattccctaccttattatagtcttggaagctgggataaccgtcacctccacgaccatagaagggcatacccatcaccagcttggaaggcggtacgcccgctttcaagtgtgcagtaacggcaccgtccgaagtaatgtcaccgctatgtcctgacggataaagcgccgaatggtgcttgggagcagaagccatgtcataagccatgatattcacaaaatcgacggaaggcaagatagccttgaagtcaatgtaacgggcagaagctacggtggcaagtgtcagttccttttcattgccgatggcagctctgatatcctgcatcagaagtgtaaaattctccgtatcgtccggtgacgaggatatatttgccatagagctggtgggatattcccaatcgatgtcaatgccatccaaagcgaactccttcaccacacggtcacagtccgcggcaaaagcacggcgatattcatcattggcagccatctcactgaaacgtccgcttccccagccgccgatggaaagcagcactttcagctccggcttctgtttcctcaaatcaacaatctgtctcaaacgttcctcattatcaatcttgacaccgttaaagctctcgtttacatgaccgaacgcatagttgatatgcgtcatgtactgcgggtcgggcatcacctcactccacgaagtgacataagcaaccacaacctttgaatcgcgggaagccgcaacgacctcttctcccgacttaacgctaccgcatgaaaccaatacgcccaaagcggcagccatcatcattctaatttttttcataagtactatctttaattacaaattatcgcaggtctgacggacccgtgaacctatcaatgcataatacagcataaacgcttctccaaaaagaacgatgagccatgaccatctccagcctccaagaacatcggcaagcactccttgcaacaagggcaatatggcaccgcctaccactccaatcatgaacacacccgaagccaccgaagtgtattttcccaaatgggcaacggacaaagtaaagatagctccccacatgatggaatggaacagacctactgccgtgagcagccacggattattcagaagaatggccagtagggcgagtagtcctgccgataccgtagtaaccgtcaactgcacgcggggagaaatcctgctcaggctactccccaccaggcggcccacaagcataccaccccaatagagcgtagccatcagtgccggagaagcataatccatctcgatggcgtacagattgatattggccccgatacagacttccactcctacataaaagaagatagccaccacgcccaatgtcagatgacggaaggaccatacacttttttccagcttttctcccttctctaccctggttccttggatatcgggcaaagacaatttcatcaacaacaatacaatcaaagaaataacagccatcaatgccaggaacggaaccatcagctggtcaatctgaatgtcctccatagacagaccaccgaacacgacaccggtcacgaaataaggagcaagcgtagttcccacagaattggcggaaccgcctatagccaaacgctgaatggactgggtacccttgacatggcaagccgtcagataaggatttataaccacttgcagaatggtagccgaagcccctaccacgaaagaacccagtaagaaaatcaagaaccctccagggataacattatttcctgcatgccaattcgcttcaggaaagtgtactgtgaaataggaagaggcaaagaacaaaccaagccccacaatcatcaccagcaatccacgcatcaatgttcctttatatccgtatttgctaatccacgacgagcctacccctccacaaaccggataagcaaggaaccaggagaaagtaatcaaagtagcaaaagtatttttcaacccgcccacttccgaaagaaaagtttctttcagaggaccctgaaactgagtattggcagtcgtaaggaaacctacaataaagaacaagaacaccatcgtgatgaatggccccatatagtttatttgtttttcttgttgtgtcatagtattttgattattaattcaaataattagttatcagccgcctgcaaggcgacttagcagttaagcatgcttgccgccgcctcatccagcagaaattcacagttgggatgaagctgaaggatggaagcaggaacatctgttgtcacaggcccttcaagcatccgcttgacaatatccgctttattagtccctttggcaaccagtacaatccggcgtgcctgcataatgttctttattcccaaagtagcccctcccaactctttatcgggaggagtacccgtttctctacggatgcgttcttccagttccacattcatccgggtcacccatgcttcaccgccaaagggagattccggctggttgaatcccaggtgtccgttctcacccaaccctaaaatcagcaaatcaataccgccacggttcgcaattttctgctggaaatccctgcatgactgttcaaaatcaccagaaatggtaggcagcatcaaaaaattctcttccttgatgcccaatgtatccatcaactccgttttcagcatcgtgtagcatgctccggcatattcgcgcggcacattcgttacctcatccaatccgaagaaagtaacggtatccaccttaaacggatatttagtatagatttctcccaccaaccgatgaagattgccggtagtacgtcccgtcgaaagtcctatcacactctccggttcattcaacatctgcccgatgatgcgccatgcagccgtgcagtcaaactccttttcattctttgttattgttattttcatattcttaatcattaattcctaatcacatattcatcgccaccgcaccggctcccagaagcccgataaatccgggattcagtttcgtaatgacaaccccgttgctgacaaaacgcatggtcgtaggatgaagtttctccagaatcttctcgtgcatatacccgtcggccacaatgcctccacccaacaccaccgtgtccgggtcaatcacacgtaccagattcatgataagattggcaagcgcctcagctgcattctccaccagcaccgtacagagagggtcacctttctgactaagtgcaaacacctcactcacaatcacccgttcccctttttcagccggaatatgcaggccggtctcatactggttgcggagcagacgggcacaattgtcaaaacctatgccggcagcaatcgcctccacacagtccatccgtccacaaccgcatttaatgcctatgttcacacctacacgcacgtgtcccacttcgccggcattgaaatggctgccacggatttgtctcccatttatcaccgtacccacggcaatgcctgtacctacatttacgtatatgaagtttttggaaatttgtccgaatccccagacgcgttcggctcttgtagcgctcttcacatcattgtctatatggcaaggcatgccatatatatccgacagttcctttgccaactcaatccgctgtgtcctgctcgggtcaatctgcagccagacaccttcgttgggatctacacgccctatcagcccaacacccatcgctaccggtttctggtcataccagcccacggtacggatataatcatcgagcgacgacttgatgatttccagcgcagcctgctgattaaagtaaccggagtcatatttcttatacctcaaaatgttgccacggctatccatttcgccaatcagcaacttcgtgcctcctaaatcaagacctaaatacgtttccattttttatatgcgttttttaatattgtttactgtccacaatattacgcactatcagggagacaagggtttattctctgacaaaaaaggtttaatacttgtcagcggtggttcaaaagcagtcttcatggctctaaattttgctgggactggtgccaaactgctttttgaagcatgtactaaaatatttcgggtcagaaaatccgaccatattcgccacttcccctatcgaatatttccgggaaaccagcagctcttttgccttgttcaaacggacaatgcggatgaagtcattcggtccctgcccggtcagcgtctttatcttattgtagacagaagtgcggctcatgcccagcatccggcagaagtcattgatggagaattccgaatcggacaactcctcctcaatcactttcataaccttgtccagaaactccttgtccaactggctggtatagtctgtctcttcgggctgcgcatccatcgccaacacggtttcgcgcaaatgctgcctattctgaagaatattcctgatacgcactttcagcacagacaagtcgaaaggcttgatgatgtagtcattggcaccggcctccagtccgaagatgatattttccctctcactcagtgcggtcagtaatataataggtatatggcttgtatctaccgatgacttcagaatccggcacaattcatcaccttccagtaccggcatcacaatgtccgagataatgatatcaggattgatttcccttgccgtctccaatgcctttccgccgtcgggcacggcaactaccttatattcggaagacaagctgtccaccagatactccctcatatccgcatcgtcctccgccagaagaaggacattcttcccggcacgttccgtttcttcatgcacagccccggtagcggcctgagcttcttcccggccgtcagccttcgcttccaccgccacgctcgcctttatcctctgcgggaaagttaccgtaaacgtagttccctgcccttccacgctactgaaagagatggtgccgtgatgctgtttcacaatgcggcgcgtaatcatcagaccgatacccgaaccggtttcctcaaagttcatggcattctgggctctataatattcgtgaaaaatattgccctgctcctctttcggaatgccgatacccgtatccttcacttcaatagtccacttctttcttgcagtcttcaccagtatgtgaatgactcccttctctgtatacttcaaggcattggagagcagattgtctatgatatgatccatcttctcccggtcaatccaaaccttgggcatatccggctccacctccaactctatcccgacgctcttctgcatggcggctaaatgaaactccgccatcttttcctccagataagccttaatgtcgtatggagaaaccttcagacactcctcgacatgcagttccgttttctgcaactcaagcagttgagtaatcattcccatcagtttttccacattcttcattgccaccgcaacggttttcttaccctgctccggaagtccctcctgcgcttcgagctcgctcagcggagcctttattaaagtaaccggtgtacggatatcatgggctatactgataaaggaacgtatcttgtcccttatacgcccctcgttcaccttatgcctcctatactgcacaaacatgtagacaaagacagacaacaagatgaaatagaggagcagcgcccaccacgaaacccagtaagggttatgaatgacaatgtccagacttctttctcccacctgctgcccggtgtacttatcaaatgcccgcaagcggaatacatacttaccggacgagagattcatatagctcacgttccgcactgaattggagtgttcccactcctcattgtgattttcgagcctatactcatacctgatacgatgcgggactgcaaagttgatggcagagaaggaaatagagaaggagttttgattatacttcaaatctattttccgggtatcattgatattcgtttgcaaaagagagcctttcattcccgctttgaccgattcgtaaagcagtttaaagtctgtcagaatcagctcaacagacacatggggccctaagtccaaagacgggagaaaggaaagaaccccttctgcagtgccgaaagcaagacatccattcttcaacttaagggcagcattcgggttgtaatatccccagctgacatccaaaaaatcattggcactgatgataatatcccgggagcagtccaagcaatacaattccttctccgtactgaaccagatacgcccttcgttatcctccagcaggctgttgatggaattggaaaccagattgtcatctacggtataggcatgcgcctctttcccatccggcccaacacgtataaggccttccccgtctgtagccagccaggtatcgccggatgaggactgcatcaggcaacggacaggataatgcagagagatgtctccaaacgtctgatgccactgcgtgtctcccgacttcttatcaaagacggccaacccgctgcaaccggcaatcagtaatgagccccccttacccggctttatgtcacctatgcaatcaatcgggtaatatgtataagtatccgtccgtatatcgtaacgggtaaactctccttcaataccaccgaaccagacataatccccttccgcataaatggcataaacatagtcggtggccattcccttctccggatgtgcatttcttttctctttcttctgtacccgtccggtctgtttatgaatacaatagacaccgataccatagccacctacccagatgtttcccccggagtcttcggcaagcgccaataccactttgccactatattccgtaccgtccagatagtgggtccatttgcgtgaccgaggttgatagaggctgacgccgttgtttgtaccataccaataatctccctccgagtcctgaaacatcacatttacatggtccgacttcagggaattatcattattgcgttcgtgcctgattctatagacatccggcatctccggatccagatagctgatgccattcgtagaagtgccaatccatacaactccggattcatccacacaaatatcggataccgtattaccactcaagcttttgtcatcatccccgttattcatataatggttcaaaagttctccggtagcgacatccatgcaaaaaacacctgcaccgtcggctcccaccagcagcaaattatcctttgtctttgcaaacgaacggataggtacatgaggaatccggtcattcaaggaatgtatttgcccttcgggaccgtcaagcacaaatacgccgtttgaaaaggtaccgatgaacagcttcgctccgaagacatagagcgattccacatgcatctctgtatgcaggtcaaccggcctcgtctcaaaagacgaagaacctgccgctcctgccttcgtcagccggaagacacccttgtcggtgcctgcaaaaaacacttcatcttccatttggactatgcaacggacagattgccccttcaatccggcaaaagacagccctgcactttcttcccaagaataaagcccctttgacatacacaaccacaaacggttttcgtcatcaaacagcatattatacaataccggagaaggcaggtaatcggccaagtccacacgcaattggaaagagtccgtcagtttgttgtatgcatagatttttccattcttcaatgcaacccagacaataccctccttatcacacatcatggtagtggaagactggatattgtccctggaatcaaccattccgtccagcttgtaatgcttgatttcattcccgtcataacgatctatcccgacatgagtatacacccagacaaatccggctgaatccttgtttatctggaatacttgccgactgcccaatccctccttgatacccaaggtgcggaatgaaccggcaaacaagtcagcggacaaaaaaacgaacacccataacagcagaaatgtacatgcaacggatttatatggaaacggatatggagcagacataggtcatatattgtttttcggatgcaatattacgcataaatataaaaaaaacggtcgaaaaactatccgaataggttcgatttctattacttttgccttccgaaaccaacaaatcatgagaagccatgctcagtaagttcaaattaaaccagctctatttcaaggacacacagtttgccaacctcatgacacggcgcattttcaacgtccttctgatagccaatccttacgatgctttcatgctggaagatgacgggcgcatcgacgaaaagatattcaatgaatacacttcgctctccttgcgctaccctccccgtttcacgcaggtttccacttgcgaggaggcgctgacacagctgtcctccatctctttcgacctcatcatctgcatgccgggcacgggagacaacgacagcttcgacgtggcacgatacatcaaaaacctgtatgaacagattccgatggtgatacttacccctttcagccacggcatcaccaagcgtattgccaatgaagacctcagtccctttgagtatgtgttctgctggctgggaaacaccgacttgctggtttccatcatcaagctgatagaggacaagatgaacctggaacacgacgtcaacgaagtgggtgtgcagctcatcctgctggtggaagacggcatccgcttttactcctccatcctgcccaatctgtataaattcgtattgaagcagagccaggaattctctactgaagcactgaatgcccaccagcgcacactgcgcatgaggggacgtcccaaaattgtactggcacgtacctatgaagaagcctttggcatctaccaaaaatataagaataatatattaggtgtcatcaccgacgtacgcttcccccgcgtagaacggggcgagaaggacggactggccggtatcaagctctgtgccgccatccgcaaggaagacccgtttgtaccccttatcatacagtccagcgaatcggacaacgcagcgtatgcagccaaatacgatgccgccttcatcgacaagaattccaaaaagatggatgtggacctgcgccgtattgtatcagacaatttcggcttcggcgactttatcttccgcaacccggacacgctggaagagattgcccgcgtaaagaatctcaaagagctgcagaacattctttttgctgttccggcagaatcattcctttaccacatcagccgcaaccacgtcagccgctggctctactcacgtgccatgtttcccgtggcagagttcctgcggcccatcacctggaatagcttgcaagacgtggatgcccaccgtaaaattatcttcgaggctatcgtgaaataccgcaagatgaaaaaccagggagtagtggcagtcttcaggcgcgaccgctttgaccgatactccaactttgcccgtattggcgacggttcgctgggaggcaaggggcgcggactggctttcatcgacaacctggtgaagcatcaccccgagttcgaagagtttgagaatgcccgtgtcgccatccccaagaccatcgtgctctgtaccgatgtgttcgacgagtttatggataccaacaatctgtatcagatagccttgtccgatgccgacgatgacgtcatcctgcgctacttcctcaaagcaaagctgcccgaccgcctggtggaggacttcttcaccttcttcgacgtggtgaagtcgccccttgccatccgttcgtcctcgttgttggaagactcgcactaccaacccttcgccggtatctacaacacctatatgattccctatctggacgacaagtacgagatgctgcgcatgctgagcgatgccatcaagggagtatatgcttcggtctacttccgcgactcgaaggcatacatgcaggcaacgagcaatgttatcgaccaggaaaagatggctgtcatcctacaagaggtagtgggcaaccagtatggtgaccgctactaccccagcatgtccggcgtggcacgttcgctcaactactaccccatcggcgacgagaaggcggaagaaggtatcgtcaacctggcactcggcttgggcaaatatattgtggacggcggcatgacgctccgcttctcgccctatcaccccaaccaggtgctgcaaaccagcgaaatggagattgccctcaaagagactcagacccgcttctatgccctcgacctgcgcaatgccggtcacgacttctccatcgacgacggcttcaacctgctgaaactgcacgtcaaagaagcggaaaaggacggagcactgaactacatagcctccacctacgacccttacgaccagattatccgcgacgggctttatcccggcggacgcaaagtcatcacctttgccaacatcctgcaacacgacgtattccccctgccacgcatcctgcaactggctttgaaatacggagagcaggagatgcgccgtcccgtagagatagagtttgccgccaccatgagccgcgagaaggacaaaaccggcaccttctacctgctgcaaatccgcccgatagtcgacaccaaggagatgctggatgaagaccttaccgctattccagacaaccaggtactgctccgttccaacaactcattgggacatggcatcatgaacgagatacatgacattatctatgtgaagacagacgactatagtgcctcccacaaccaggagattgcctgggagatagagaagctgaaccagcagttcctggacgaaggccgcaactatgtccttgtaggtcccggacgctggggtagcagtgacacctggctcggcatccccgtgaagtggccgcacatcagcgctgcccgcgtgatagtggaagccggactgaccaactaccgggtagaccccagccagggaacccacttcttccagaacctgacctcctttggagtgggatactttaccatcaacgcctttatgaatgacggcgtatacaaccaggaattcctgaatgcacagcctgccgtacacgagacgaagtacctgcggcatgtacatttccaccagccaatggtggtaaagatggatggcaagaagaaactgggagtggtgctgatgcccgaagaataaatcagtccgtcagccggtgcagcacaatcatcaccacctctgcgggagcaaacatgcggatggctttctgcgaagtgccgatgccgttggtgacaatcatcgggatgttctttgagttgtacttcagcccggagaggaaccgctgcccgtagtgcgaggggactatcggtgcataaagcccgaacagcgtcacctgcccgccatgcgtgtgtccggccaggatgagatcggagtttgtcaccgggacgtcctcggcatagtccggcgtatgcgtcagcaggattacgaaatcgtcgggcgaaaggccgagtgtgggcgatgtgccgttcttgcccaagtcgaaaggattgcgcacgcccgccacaagaatccgctcaccgccacgccgcagggtgtccaccttatgctccagcagatgcatgccataatgcctcatttcgcgcacgatgtcgtcatagcaagcctcgtagtcattgttgccaagcacggcataggtgcccaacggcgtcttcacttgcgccagggcagccatgacgggcggcacgtactggcagccttcgtgaaagtcgccgccaatcagcagcacgtcggccttctggtctatgagcaggcggaccaggtccttcaatccctcctccttcagcaggcttttgtagtgcaggtcggagacaaaggcgatgcggaagccctcgaaggcggcaggcacgtcgcgatgcgtgaagtcgtacgtcttaatgcggctgacgcccttataggccgagcctacgtgggtggttttcgatgtgattcttgtacctcgctgcacaattaccttttgtaccggtgccgttttctttatctgctgtttctttacctcgcccttcgccggctggcggcgaacattacgcaaatcagactggtcaaaggtgaacatcggcgaaaggcgggcaggcaacccgatagtatcgccaagctgcgtgctgtctgcctgcatgactgactgcggcaacgacacggtaatcatccgcttggaacggcaggaagacaagagcagcagagaaagaatggatatgtagactaacttcttcatcataagtgggtacaaatatagggattttcagtatttttgctggcagatgccgaactaaattggaactacgatgaacgagattaaacagaattcaccctacgcatggtttctcgccgcccgccccaagacgttgacgggagccatcatcccggtattgctgggcagtgcccttgccttcagcgacggacagttcaagaccgcacccgccctgctgtgcgccctctttgcctgcggcatgcagattgccgccaactttatcaacgacctcttcgacttccagaaagggaccgaccgtcgggaagaccggctggggccgcagcgcgcctgcgccgaaggttggattacgccggcagccatgaaaaccggcatcggcatcgcactgacactgtcgtgcctggcagggctggcagtgctgttcaccgtctgggggcagctgccccacggaggctgggaactggtggtgctgggcgtggtgtgcatactgtttgctttcctctataccacgctgctctcctatcggggctggggcgacgtactggtgctggtgttcttcggcttcgtgcccgtatgcggcacctactacgtgcaggcctatacgctgaatatggatgtggtggtgctgtcgctcgtcagtggcctcgccatagacaccttgctgatggtgaacaactatcgcgaccgcgagcaggatgccgtgagcggcaagtgtacgctggtggtacgctacggcaagaagttcggtgagaatatgtatctggcactgggcatcgccgccgtgctgctctgcttctggtttgtctacacgggcaagctgactccactggaatttatctgggctccctgcgtctatctctatatgcacgcactgacgtggcgcaaaatgatacagataggtagcggtaaaaagctgaacagcatactgggcgagacgtcgcgcaatatgctgttcttaggattactgttagcggtggcgctgaattgagaggttagaggttaaggattagcggttaggccctaatccctaaaccttaacctctacctccatacatctgttcgtaatacttctgataatcaccgctggtcacttcttccacccacggctggttgttcaggtaccattcaatggtcttgacgatgccgacctcgaacttcgtctccggataccagcccagggcattggtaatctttgtggggtcgatggcataacgctggtcgtgacctaggcggtctttgacgaaggtgataaggtcttcgtttatccagctgatgtcaatcgtgccgtcggcggcttttacttgtttcttcagcactgcacggtaacggggttcttcctccatcaagcggcggacggtggcaatagtcagcttcacgatttcaagattggtcttttcgttgtgaccgcctacgttgtagacttcgccttccacaccctcgcggacaaccaggtcgatagctttgcagtggtcttccacgtagagccagtcacgcacgttgctgccgtcgccatagacggggaggttcttgccttcgagaatattcttgatgataagcggaatcagcttttcggggaagtgataaggaccgtagttgttggaacagcgggtgatagtgacgggcatcttataggtatcgtgataggccatcactaccatatcggcactcgtcttgctggcgctgtaagggctgtgcgggcagagcggggtttgctctgtgaagtagccttcggcaccaagtgagccgtaaacttcgtcggtagacacttgatggtaacgaacgcctttgcgccaagtgggataaccggactcgtccttacccgtgacccaggcacggcgggcggcatcgagcaagttttgtgtacccaggatgttggtcatcaggaaaagctggggattctctatgctacggtctacgtggctctcggcagcaaaattcactacgtaatcgaatttatacttggcaaacagttcgtcggcaagcacgcggtcgcagatgtcaccttttacaaaaaagcaacgttcatcgtcaatgtcattggcaatggtgcccagattgcctgcgtaggtcaaggcatccagtatcaccactttaatatcattatgttttgccaggatatatttaatatagttggcgccgataaaaccggcggcaccggttacgagataagtcttcatgagaattaaaaattataaattaaaaattaaagtcagcgggcctttataggagaactattctccttctctttttggggaacaaagagttcatcgcttcgattcagccagttccatcaggtatttgccatattcggtcttgccaagctgttcacccaagcgatacagctggtctacatctatccagcccttgcgccaggcaatctcttcgatacagctcacgcggaagccttgacggttctggatggtggcgacaaaattgctggcttccagcaggctgtcgcaattgccggtgtcgagccaggcaaagccacggccgaagagctccactttcagcgtgccctcgtccagatagagacggttgaggtcggtaatttcgtattcgccgcgagcagagggcttcaaggaggcggctttctctgtcacggtggagtcgtagaagtacagtccggggacggcatagttgcttttaggattggcaggcttttcttccagcgagacggctttgccgttggcatcaaactccactacaccgtaggcacgggggtccttgacgtaataaccgaagatgcaggcacccttgtctatggaagcggcacgcttcagcatggcggagaagccttgaccgtagaacatgttgtcgcccaggatgaggcagcccggtccgccgtccaagaactctgcacccagcacaaaggcttgtgccagtccgttgggattctcttgtatcttataggaaaaggacataccgagttcttcaccggttcccagcagctcgcggaacatgggtaagtcacgtggagtagagataataagcacttcgcgaattcccgccaacatcagtgtagagagcgggtagtatatcatcggcttgtcgtagacgggcattatctgcttggagatagccttggacaacggatagagacgagtggcactgccacctgcaagaataattcctttcatatttcagttctttttcggtgatacttcaaaatggagaataaaataagaaggaggacgatgccccacggctctacttgctattcgggtacaaagataatggaaaaattcgattaagtgaaggcttggtttcatctttttacttcattgctttgcttactccggtacattgttttgcttacttcagtgcgtaacggccgtcaccccttgatgaaacggtctttacctcagcgtgtaacgacctttaccaaatagtgtaacggcctttacccaatagcgtaacaacctttacattagcatgtaacggcttttacactatagcgcaagcaatcggtaaatacaatccattgaaaataaacaaactacatcatcggtcagcaagttctatcacctccaaatctttaaacgttcccccatcaaccgcaaagcgtaccatcgtacgcaccttatggaaaccttgaatgcccgcagcgcccggattgatgtggagtacatccaacgtcttgtcatacttcaccttcagtatatgcgagtgcccgctgatgaacagctttgggggacgcaccagaatgctgcccttgatggaagggtcgtagttgccgggataaccgccgatatgcttcatcagcacctccgccccatccaccgtgaaacggagaatctgcggatagagctgccgtatctcctgcccgtcaatattgccatacacggcacggaagggacggaaagccgccagcttctgtgccacttccagcgaaccgatgtcaccggcatgccatatttcgtcacagccctcaaaatattgcaggtacttttcatcccagtagccatgcgtatccgataataaaccaacttttgtcatctttcctttgtttattaagacaaagataattatatttgggaaagaaatcaatatgctaatgtgataatgtgccaatatgctaattggctgcgcaccatccgcgaacttctcttcattagcacattggcacattaatcactttagcacattaaactatggaaaacagatatttcaaacgtgatatcagctggctgtctttcaactaccgcgtgctgctggaagccgaagacgatacactgccgctatacgaacgcatcaacttcatttccatatactcctccaatctggaagaattctacaagatacgcgtggccgaccataaagccatagccaccggagcctcgcaaagcgatgaagagactgtgcagtccgccgccgagctggtagatgaaatcaaccgggaagtcaaccgccaactggaagaccgtatccgcatctacgaacagaagatactgcccgccctacggaaacaccacatcatattctatcagagccgcaacgtggaaccgtttcataacgacttcgtgcgcaacttcttccgcgaagagatattcccctatctggccccggtacccgtaagcaaggacaaggtgatttcattcctgcgcgacaaccgtctctatctggccgtacggcttcatctgaaaggagctcccgtcggttctccaaaccgcatccaatatttcgtgatgaaactgccgtacagcaaagtgccgcgcttcatccagctgcctaaggtggggaaagactattatctgatgttcattgaagacatcatcaaggccaatctggataccatcttccccggttatgaagtggacagcagttattgcatcaagatttcacgcgatgcggatattctgatagacgatgccgccaatacctccgaaatcatcgagcaggtgaagaagaaggtaaagaaacgcaagataggcgccgtgtgccgttttgtatacgaccgcgccatgccccaggacttcctcgactttctggtagatgcctaccgcatagaccgccgggagctggtgccgggagacaagcacctcaacatggaggatttgcggcatctgcccaatcccaaccaaagcgtacgtcccatcaagaaaccccagcccatgaagctgacctgcctggacgaacgcgaatccatcttccgctatgtggagaagaaggacctgctgctgcattatccctaccactccttcgaccacttcatccattttctatatgaagccgtccacgaacccaccgtgcgcgaaatcatggtgacccagtatcgcgtggcagagaactccaccgtcatcaacaccctgatagccgccgcacagaacggaaagaaagtcaccgtctttgtggaactgaaagcccgcttcgacgaagaaaacaacctcgccaccgccgagatgatgaaagccgccggcatcaacatcattttcagcataccaggactaaaggtacatgccaaagtagccctcgtgctacgccgcgataaggaagggcgcaaactgacaagctacgcctacatcagcaccggcaacttcaacgaaaagaccgccaccctctatgcggacagcggactattcacctgcaacccggtgattgtaaacgacctgcacaacttgttccgtactctgcagggaaaggaaaatccagtgttccaccgcctgcttgtggcccgcttcaacctgattcctgaactgaaccgcctcatcaatcacgaaatagaactgacccggcaaggcaagcaaggacggattatcctaaaaatgaatgccctgcaagaccccgccatgatagaccgcctctacgaagcctcgcaagccggtgtagagatagacctcattgtccgcggcatctgctgcctcatccccgggcaggagtacagccacaacatccgcgtgacacgcatcgtggatacctttctggaacatgcccgtgtgtggtacttcggcaacggcggcgcacccaagctcttcctcggctcgccggactggatgcggcgtaacttgtaccgccgtatcgaagccgtcacccccattctggacccggacttgaagcaagagctcatcgatatgctatccatacaactgtcggacaaacggaaagcctgctttgtggacgaccggttgcgaaaccgctggaagtcgtcgcgaccgcaaaaggagaaggtacggtcgcaatatagcttttacgaatacttgaaacaagggattaaggattagcgattaacgataattatcaatcgtcaattatcaatcgtcaattatcaatcgtcaatcactttgtaacatttctgtaacatgtatgacatttccctgcaacaccaaactctttcctttgcagccggaaataaaatacatgtctatggaaacaatttatctgggtatcgtcatctttctgttcgtactcgcgattttcgacctcgtggtaggtgtcagtaatgatgcggtcaattttcttcagtcggctgtcggagcaaaggcagcatctttcaaaaccatactgttcattgcaggcattggcgtcttcatcggtgcggcactcagcaatggcatgatggacattgcacgacacggcatctatcaaccggagcacttctactttgccgaaatcatgtgcattctgcttgccgtcatgttgacggacgtcgtgctattagatgtcttcaacactatgggaatgcctacctccaccactgtatccatggtgttcgaactgttgggaggtacgttcgcactggcgctcatcaaggtctataacagcgatacattgggactgggcgacctcatcaatacagacaaggcactgtctgtcatcatggccatttttgtatccgtagccattgccttcttcttcggtatgctggtacagtggctggcacgtatcgtgttcaccttcaactacaagaagaacatgaaatacagcatcgcgctgttcggtggtatagctgccaccagcatcatctacttcatgctgataaaggggctgaaagacagctcattcatgacccctgaaaacaagcaatggatacacgacaataccgcattgctgataaccggtttctttgtattcttcaccatactgatgcagatactgcattggtgcaagataaatgtcttcaaagtagtggttctgatgggtactttcgccctcgctcttgcctttgccggcaatgacttggtgaactttatcggtgtccccctcgcaggatattcctcatttattgactatacagccaatggtacggccgccggccccgacggattcctgatgtcctcactcctcggtgcagccaaaaccccgtggtatttccttatcggtgcaggcgccattatggtttatgcactctgcacatccaagaaagcccacaacgttatcaagacttccgtggaccttgcccgccaggatgacggtgaagagaacttcggaagtaccccgatagcccgtacgctggtacgcttcagcatgactctggctaacggaatatccaaaacgatgcctgaaagcagcaagcggtggatgaacacacgcttccagaaggatgaagccatcatagccgacggcgccgcttttgacttggttcgcgcctccgtcaatctcgtattggctggtctgctcatcgccttgggaacttccttgaaacttcccctttccaccacttacgtcacctttatggtagccatgggtacatcgcttgccgaccgtgcctggggacgtgattcggcggtattccgcattacgggtgtgctcagcgttatcggcggttggttcatcactgccggagcagcgttcaccatctgtttcttcgtagcactgattatccatttcggcggtacggttgccatcctggcactgattggtctggcagtcttcatgctgattcgtagccaagtgatgtacaaaaagcgcaaggagaaagaaaaaggcaacgagaccctgaaacagttgatgaagagtacggacaacaatgaagtcatcgaattgctccgcaagcatacccgtgaagaactggtgaagattatggaattcacagaagagaattttgaacgtaccgtcacttccttcctacacgagaatctacgcggactgcgtcgtgccatgggctcagtaaaattcgaaaaacaactcatcaagcagatgaagcgtaccggaacacttgccatgtgccgtctcgacaacaataccgtactggaaaaaggactctattactatcaaggcaacgactttgccagcgaactggtgtacagcgtaggccgtctttgcgaaccttgcttagagcacatagacaataacttcaatccgctggatgccattcagaaaggagaatttacagacgtagccgaagacatctgctatctgttacaagtatgccgccacaagctggaaacgaacaattatgatgaactggaaacagagattcgcaaagccaacgacctcaacggacagttgtctcacctgaaacgcgaagagctgcaacgcatccaaagccagagcggcagcatcaaagtcagcatggtatacctgactatgatacaagaagcccagaacgtagtgacctacaccatcaacctgatgaaagtaagccgcaagttccaagtagaaaaagaagagttataagttatgagttataacgcatggtacataacatgcaacttataactcataactccttaagccccatcttctccgcccgttgcaacataaatgcacgggcggcttcgtattcattgggaatgatgccgtccaaaatggcatccttaatggcactcttcaaggcacctacctgctggcaaggagaaaggccgaaagtcttcatgatttcttcaccactgaccggaggctggaaattacggatacggtcgcgttcctccaaatccttcagcttctggcgtaccaactgaaaattattaaggaagcgtttcttacgctccatattcttggaagtaatgtcggcttcgcacagtgtcatcaggtcgtctatatcatcacctgcctcaaacaagagacgacgcactgccgagtcggtcactacatcatccgctatcacaatgggacgcatgtgcaggctcaccattttctgcacatatttcatcttctcattcatagggagcttcatcttgcggaaaatatcgggtatcatcttctcgccaatgaaattatggttatggaacgtccagcccgcacggggttcccaacgcttggtggcaggcttggctatatcatgcagaagagctgcccagcgtagccaaaggttgtcggtcttcttgctgatgttgtcgagtacttcgagcgtatggtagaaattgtccttatgggcgcgtccattgcgcgtctccacgccttgcagcctaacaagttccgggaatatcagttccagcagaccacagcggtccagctcaatgaatcccttagacggaataggtgacaagatgattttgttcagttcgtctgcaatgcgttctttggagatgatggagatgcgttcgcgattacgctccagagaatcgaatgtctcatcgtcaatatagaatcccagctgggtggcaaaacggacacagcgcatcatgcgcaaagggtcatcactgaaagttatatcagggtcgaggggagtccggatggtcttttccttcaagtctccaataccgccaaaggggtcgaccaactcgccataacgcacccggttcaggcaaacagccagtgcattgatggtaaaatcacggcggttctggtcatcctccaatgtaccgtcctctacaataggcttgcgggaatcgtgtgtatacgattcttttcttgcacccacaaactcaacttccgtaccatagtacttcaattgtgccgtaccgaaattcttgaagacggaaacatgcgccccacgccccagacgcttacccagcgcctcggccatggcaatgccactgcctaccaccaccacatcaatatccttggaaggacgttgcaggaaaatatcacgtacatatccaccgactacgtaacattccaatcccaattcatcagccgtttcggatatccgcttgaatatatcatcactaaaatattgcttcagttcttctgccgtcaaatctatcataaataatgcgctaatgtaatgaatacgcaaatgtgttaatggtctattagcacatttgcacattaaaatgctgcaaagataaagatattatttctatttttgtggactctaactccaagaacaacaaatatgaaaaaagtaatactccttgcatgcctatgctgtacactcttctcttgcgaagatgtggagaagaaggccggtgaaaaactacaagctgcccgcgaagcgtttgaactcggcaactacaatgaagcgaagattctgattgacagcatcaagatgctctatcccaaagcgtttgaaactcgccgtgcaggcatcggcctgatgcaggaagtggaactgaaagagcaggaaaagagcctggtctatctggacagtatgcttcaagccaagcaaaaggatttcgatgcaatcaaagggaaatacacctttgaaaaagatgccgaataccagaatatcggcaattaccttcatccttcccaagtgatagaaaaaaatctgcatcgctctttccttcgcttccaggtagacgaaaacggagtcatgagcatgacttccatttattgcggagcccataatatccaccatgtggccgtcaaagtcactgctcccgatggtagctttgccgaaacacccgccgccaaagacagctacgaaaccactgacctcggtgaaaagattgaaaaggcagacttcaaactgggagaagacggaaacgtcatggggttcctttatctgaacaaggacaagaatatcaaagtcaactatcaaggggaacgtccctattccatcaccatgactgccgccgaccgccaggcccttgccagcgtctacgaactggcacaactgctgtcatccatgacggaaataaagaagaatatggaagaagccaatctcaaaatcgaatttgtaaaaaagaagatggaagagagaaaagacaatgcacaagaataaaaagaaggaaaccggatgatatattcattacttagtcatccggttccctttttattatcagtaaagccttaccaaactaatttaggtaaataacggctcagacatgtacgcaaagcagacagagtgatgggttttaccaacacttccgaggctccgcactccaaggctttttcgcggtcggcagtaaaggcgtaagcggtctgcataatgatgggaagttccttatccttcttgcgaataatcaccgtagcatccagcccgttcataataggcatttttatatccatcagaatagcttccgccttgtcgcgattctcttcgaacaaatttacaatatcctcaccattctttgcccatagtatctcgcatttcttgccgataatagcctttatcagtttaaagttactatcatcatcttccgcaaccagaataagcggacggtaatctcctgacactttttctatttccatgacctatgcgttttgtttatataggggcaaagatataaaaaataatagatttgcactatctttgcagctcattaaaaaaatatataatgatttctatagacggactggccgtagaattcggcggaactactttattcagtgacatatctttcgttatcaacgaaaaagaccgtatcgccctgatgggtaaaaatggagcggggaaaagtacattgttgaaaatcctggcaggtgtaagacaacctacccgtggaaaaatctcagcccccaaggacagtgtcatagcttaccttccacagcaccttatgacggaagacggacgtaccgtattccaggaagcggcgcaagcctttgcccacctgcatgaaatggaagctgaaatagagcgcctcaacaaggaactggaaacgcgtaccgactacgaaagcgacagctacatggaacttatcgagaatgtctccgccttaagcgaaaagttctatgccatcgactccaccaattacgaggaggatgtggaaaaagcactgctcggactgggctttgtacgcgaagacttcaaccgccagaccagtgacttcagcggcggatggcgcatgcgcatcgagcttgccaagctgttgctgcaaaagcctgacgtgctgttgctagacgagcctaccaaccatctggacatagaatccatacaatggctggaagatttccttatcagcaatggaaaggctgtcatcgtcatcagccacgaccgtaaattcgtagacaacatcaccacccgtaccattgaagtgaccatgggacggatatacgattacaaagtaaactactccaaatacctggaactccgcaaggaacgccgcgaacagcaacagaaagcctacgacgaccagcagaagttcattgccgaaaccaaggaattcatcgaacggttcaaaggcacctactccaaaaccctgcaagtgcaaagccgcgtaaaaatgctggagaagctggaactgctggaagtggatgaagaagacacttcagcgttacgcctcaaattccctccttctccccgctcaggcaattatcccgtcatcatggagggagtagggaaaagttacggtgaccatgtggtcttcaagaatgccaacctcaccatagaacggggagacaaggttgctttcgttggtaagaacggtgaaggaaagtcaacgttagtgaagtgcatcatgaaggaaatagaacatgaaggcaccctcacgataggacacaacgtgcagattggatatttcgcacaaaaccaggcctcattgttggatgagaacctgaccgtattccagaccatcgacgatgtggcaaaaggggaaatccgcaacaagatacgcgacctgctgggtgccttcatgttcggtggccccgaagagtccatgaagaaggtcaaggtgctttccggtggagagcgcacgcgcctcgccatgataaagcttttgctcgaaccggtgaatctgctgatactggacgaaccgaccaaccatctggacatgaaaaccaaagatatcctgaagcaagcgttactggattttgacggtacccttatcctcgtcagccacgaccgtgacttcctggacggactggtaagcaaggtatatgaattcggcaacaaacaagtgaaagagcacttgagcggcatctacgaattccttgaaaagaagaaaatggactccctccgcgaactggaacgataagcatctgctaaacccggcgtccgaacaaatggccgatacatattgttttcattttactaaacacttaactaagagatattaaaatgaaacaatatgatgccatcataataggattcggcaagggcggcaagttattggccgccgaactggccgaacggaattggaaagtagccatcgtggaacgttcccctcagatgtacggaggaacatgtgtaaacgtaggatgtatccctaccaaagctctgattcacgaatcggaatatgcggaaaaaagatactatgacgattataagaaccagtccaaactgtatgcacttgccgtggcgcggaaagacaagcttgtatccttcctgcgtgagaaaaattatgaaaatgtaaaaaacaagcctaatataaccctctatgacggaactgcttctttcttgtccgaaaatacaatccgtatagtctccggcaaggacgaaacgattcttgagggaaaagagatattcatcaacaccgggtccacccctatcctgcctgccatcgacggactcaaggagagcaagtacgtatataccagtgagaccttgctgcaatcgaacaaactgcccgcacacctgctcgtcatcggcggcggtgctgtcggattggagtttgccactatgtatgcaggctttggaagccatgtcacactgctggaagcgggaaaccgctttctgcctaaagtggaccgcgacattgccgcctccatgctggaagcattgaaccgaaaacgtatcaatgtccggttgaacgcccgtgtccaatccgtgtacgacacagccgaaggaataactctgacctatacggacagtgcaaacggcactccctactacctgaaaggagatgccttgctggtagccatcggtcgcaagcctatgactgcagagctgaatctggaaaaagcgggtatacaaacagacaagcggggagccatcgttgtcgacaaccaattacggactacagccccacacgtatgggccctgggggacgtaaaaggagacgaacagttcgactacttgtccatcgatgatttccgtatcatccgtaatcaactctttgaaaacaaaaaaaggagtacaaaagaccggtatccaatcccctttgccattttcaccgacccaccgctggcacatataggactgacggaagaggaagcgatgaagaacggttattccatacatgtggcacgcatccctgctgccatgattccacgtgcccgtacgctacacagcatagacggtatgctcaaagctattgtagacatccataccggacggattctgggttgtaccctactttgtgccgatgcaccagaagtaatcaataccgtagcatcaatcatgaaaacgggacagcgttaccatttcctgcgggacttcattttcacccaccccagcatgaatgagggattgaatatgttattcaaacctttttagcattttctatttggtaattaagtccttaacctctatctttgcatccgtccaaagatagaggaatgaaaaagaaacagtacataacctatattctttttttcatcagcttgataatgctggtgatacccgtcattccccaccatcatcatgccgacggaatgatatgcatgaagaatgatatcaccgccgattgctgcggacaccgtcatagcccgggcaacgagcactgctgttgcgacacgggatgcatgacaacccactttgtacaacagacgcccagctcttccaatgatgtgtgttcacatccggatgccttgtgggcagttaccctactcattgaacctttttccaagttactcatcctacccgagtttgacataagcaggcaggagtgtatctatctggaatctcttcatagcacatttatcatatgtgctacgggacttcgtgcccctccgtctcttcttgcttaactgttaccggaacatcaccgggacagatttctatccggcataaggaacaatgcaatttggttgcacgccctatgccctaactttgtattcaaaatcaaaaagtaagaacaaatatcatcatgaaaaaagttattttcatgggagtcttgggattattccttttaggctcctgtaacagtaagtccggagacagccacgaaggacataatcacgaaacagaagagcacaatcatgacggacatgaccacgagggacatgaccacgaacatgagggacacaaccatgagcacgaagagcaggaaaaccatgccggaggaagcgatgaaatcatcctgccaccagcaaaggcgcaagctgccggcgtagcagtcagcactgttgaaccgggtagtttccatcaagtcatcaagaccagcggccaggtgatggcagcccagggagacgagagcgtagccgtagctacagtagcaggcgtggtttccttcaagggaaaagttatcgaaggaatgagtgtcagcaaaggtactcctttggtggtattgtcatccaaaaacatggccgacggagacccggtgcagaaagcccggatagcctacgaggtttccaaaaaagaatacgagcgtatgaaagcgcttgtaggcaacaaaatcgtatctgaaaaggaattcgcgcaagccgaacagatttacgaaaatgcccgtatcagttacgaggcagtcgcaaagaaccattcggcaagcggccaggctgttgtttctcccatcagcggttatgtgaagaatctgttggtgaaagaaggggactacgtcagcgtcggccagccgttggtaagcgtcacccagaaccgcaagcttttcctgcgtgcggatgtatccgaaaagtactatccttacctaaacagcatcggttctgccaacttctgtactccttataataataaggtatatacattgaaagaactgggcgggcgcatgctttcttatggaaaggcttcgggtgagaacggatattatgtacccgtaacttttgaattcgacaataagggagacgttattcccggctcgtttgtagaagtattcctattatcctcaccaatggagaacgtgttgtctcttcctcacagtgcgctgaccgaggaacaaggcagcttctttgtctacctgcaactggatgaagagggctacaaaaaacagcttgtcaccctgggtgccgacaatggcgaaagtgtacaaatcctttccggcataaaagcaggcgatcgcgtcgtaacccaaggagcctatcaagtgaagctggcatcggcaacgaatgctattccggcacatagccatgaacactaatctcatgtacaatttgacaatttacaaagtaccatttcgctatgcagtataagggttacgtgacgaatggggagtgtaaagtcagataaacaagaaatattagataaaacagcaagtgcggctgacattgcgcagcccaattgtacattgtaaatagtaaataaaaagatgttaaacaaaataattggtttttctcttcagaaccgcatcctggtgctggtagcatcggtgctgttgctgattggcggtacttataccgccatgcatacggaagtggatgtgttccctgacctcaatgcgccgaccgtggtcatcatgaccgaagcaaatggtatggcagcagaggaagtggaacagctggtcacttttcccgtagaaacggctgtaaacggtgcaacgggtgtgcgccgtgtacgctcttcctcaacgaacggtttttctgtagtctgggtagaattcgactgggatacagatatctatcttgcccggcagattgtcagtgagaagctggcagtcgtcagcgaatccttaccggccaacgtaggcaagccgacactaggcccacaatcgtccattttgggcgagatgttgattgtaggtctgacagcagattcgacctctatgctggatttgcgtaccattgccgactggaccatacgtccccgcctgctctctacgggcggtgtggcacaagttgccgtactgggtggcgacatcaaggaatatcaagtgcagctggacccggaacggatgcgccattacggcgtaacattgagcgaagtgatgaacatcacccgcgaaatgaacctgaatgccaatggtggagtgctctatgaatatggcaatgaatatatcgtacgcggcgtactttctaccgacaaggtagaccagatagccaaggccgtggtgcggagcaacggagtctccggcgcccctatccttctggaagatattgccgacgttcaagtcggagccaaacttcctaaactgggtaccgcctcggaacgcggtaagcatgccgtactgctgacagtcaccaagcaacccgccacaagcacgctggagcttacagacaaactggaagcttccctgcaagacctgcagaagaatctaccggcggacgtaaaggtttccacagacatcttccgtcaaagccgtttcatcgaaagttccatcggaaacgttcagaagtcgttgttggagggaggtattttcgttgtcatcgtgcttttcctgttccttgccaacatacgtaccacagtcatctcgctggtgacactgccgttgtcactgattgcctccatccttgccctgcactatatgggctttacgataaataccatgagcctgggaggtatggctatcgccatcggttcgctggtggatgatgccatcgtggacgtggagaatgtctacaagcgtttgcacgaaaaccgactgaaacctgccggcgagcaacttcctattctggaagtggtgttcaatgcttcgaaagaagtgcgtatgcctatcctcaattcaacgctgattatcattgtcagcttcgtaccactgttcttccttagtggtatggaaggtaggatgttggtaccactgggtattgcgttcattgtggcattggcggcttcaactgttgtggcactgaccgtaacgccggtactttgctcctatctattgggaaaagagaaaacgaaaaaacaaaacaacgaaaacagcgattctgccgtagcacgcaagatgaagcaatggtatggttctgcactgactttcgtattggggcataagaaaggggtactgggaggtactatcggactatttgtagtagcgctcggctgtttcttcaccctgggccgctcgttcctgccgcctttcaatgaaggttcgttcaccatcaatatctcctcgcttccaggcatttccctggaagaaagcgacaagatggggcaccgtgccgaggagctgctgctttccatccccgaaatacagaccgtggcccgtaaaacgggacgtgcagagctggacgaacacgctctgggagtaaacgtctctgagatcgaggcaccgtttgagttgaaagaccgctcgcgcagcgagctcgtggcagaagtccgcgaaaaactgggtaccattgtaggggcaaacgtggaaataggccagcctatcagccaccgtatagacgccatgctatccggtacaaaggcgaacatcgccatcaaactgttcggcgacgacctgaaccgcatgttcactctgggcaatgaaatcaagagtgccatccaggggattcccggtattgccgacctgaacgtggaacagcagattgagcgtccgcaacttgtcatttcacccaaacgggaaatgcttgccaaatacggcatttcactgcccgaattttcggagtttgtcaatgtctgcctggccggtgaagccgtttcccaagtttacgaaaagggaaagagcttcgacctgaccgtacgcgtgaaagacaacctacgcgacgaaatggaaaaaatacgcaacttgatgattgatacgggcgacggacagaaaattccactgaactatgtagcggaaatccgctcggccatgggtccgaacaccatcagccgcgagaatgtaaagcgtaaaatcgtcatctccgccaacgtggccgaccgcgacctgcgaagtgtagtcaatgatatacaagcccaggtagacgcacaaatcaaactgccggaaggataccacatcgaatacggcggacaattcgaaagcgagcaggcagcaagccgcacgctggcacttacttcgttcatgtccatcgtggtgatattcctgctcctctaccatgaattccgcagtgtgaaggagagtgccatcatccttatcaatctgccgctggcattgataggcggtgtattcgccctgctcatcacaacgggagaagtgagtatccccgccatcatcggtttcatctcactgttcggtatcgccacccgaaacggaatgctgctcatcagccattacaaccacttgcagcaggaagaaggctatggcgtctacgacagcgttatccgcggttcgctcgaccgtctgaatccaatcctgatgaccgccctatccagtgcactggcacttatcccgctggctctcagtggcgacctgccgggcaacgagatacaaagcccgatggcaaaggttatcttgggcggccttttaacatccacgttcctgaacggtttcatcattccgattgtttacctgatgatgcaccataaccaacaacctaaaacgtcagacaatgaataaaagatttttcatattcagcgccgccatcctcgcttttgcggggatgagcgcacaaacgtccggcattgatgccgtgctccagcagatagaggccaacaacaaggaattgcaggctaactcccacctcatttcctcacaaaaactggagaacaagacaaacaacaacctccccgaccctacactgtcatacgcccacctttgggactccaagaacagtgacgagacagtcggcgaaatggtcatctcgcaaagcttcgacttccccacgctttacgccacccgagggaagatgaaccgactcaagacaaatgcactggatgcacaagccaccgccttccgccagcagatattgttgcaagcgaaggaagtatgcttggacatcatcatgctgcaacgccagcaagccctgctcgacgaacggttgaagaatgcggaggaactgtcggccatgtacacccggcgtttggaaacgggagatgccaatgcactggaaaccaacaagattaatctggagttgctgaatgtacgcacggaagcccgcatgaaccagacggcacttaacaataaactgaaagagctgcttgtcctcaacggaaaccagccgctcacaccgggacgtcccagacccgataccacacccgacgcccaaacactcggattgacagaatacccggcagtgccgttgccggccgacttccacccgctggccgacgaactgctggcttcagaccccaccctgcaatccttgcagggtgaaagttctgccgcccggaaacagatttcggcaagcaagcaaggctggctgcccaaactggaactgggttaccgtagaaataccgaatcggggcatccgctaaacggtgtagtagtaggcttctctttcccgcttttcgaaaaccgcaataaggtcaagatagccaagacacaagcgctcaacattgactaccaaaaggagaacgccgcactgcaagccagctctgccttgtggcaactctatgaagaggccaagaacctgcacgcttccatggaggaatacgagcgcaccttccatcaacagcaagacctttctttactgaaacaagcacttatgggaggacaaatcagtatgattgaatacttcgttgaaatatcggttgtctatcaaagcaagacaaacctcctgcaactggaaaaccagtatcagaaggcaatggcacagatatacaagagccggttataaatagaaagagctgtctgcggttgacagacagctctttctatttcaatatattgtagttatagttttgtgactttacccataaacagaataactcccgtactcttctcctttatcagaaagatgaaaggacggtccacatagaacggaattaccgtacttggtccgggagcggccacgtccattcctccgacagttacagccgcagcttccgtcccctcttcattcactttcacataagtgaactgttgcagcaaactgataaacaaatcctcatccgccattccggaaaaatcggccgatggagtaaaagcctcctgcattcccattgccatcatatcgtcaatgagttctttatcatattccatttcaaaccggggtaacttaaggttcaaggcagagcttgataaactactgttccattccccccagcgctcgtcattcagctgcggcaggcactcatccaacgattttccctctgccggcaagagcaccaccatactgaaagcctcattgccgtaaggcaactctgccattgagaaatactcattctcggcatagttgaatctctcgtcacgaagattcatcatgtgtacagtcgatttgcttccgtcagcattcgtaaaagcctcttctgccgtatccgattttttgaattgattcttccaaatccccttgaaataaagcgcattcaacagataaagacgcgccgtctccggaatctcattcaagactttggggatgcaattattcgttttcccggcacaccagccgtttataatgtccggagccttgggagaggcaaaatccagctcctgcacttgcgcgtcatacatctttttgtttacgcttacaaagtcgtcatgaacaccgaaccctttctttatccagatggaattggcaattcccaactgtgtggtattgtccaaatcgagcaacgcctccaccagcttcttattatagttgttcatttcttccaacgaatagcccgaaaagcccaggacatctgtcatctcagatagtgtgtttcccaacgctccattggcaatcatagacagacagagcgaagcgctcaaaggagagatgaacagattgggcttttccacctcagttttacaaacctgattaaagaaacggaaagcgaaatccgttcctaaatccatcatctcctgctcggcacgggtcaaggcaatgtctttgcgaggcttgggttgtggtgaagagttgtcgtcactctggcaggctgcaaggatacaaagtaggcttaaggcagtaatcgtttttttaagcataagcaaatagtattagttttaaaacagttatctatatatagaaaatgcttgaacaaacaaaatactgcattgaagaaacaataaaaaatagtacattcctactctattattatactgcaaagttctgcatattttttgcagtcgcactgcatatgtgttgcagcaccactgcatatgtgttgcagtcgcgctgcatatatatttgcagtgtcactgcaacagctctgcagtgctactgcaaaatatatacagcagctttgcagtaacgtgattgatttcacccggttattgttgccaattccagcaccccttccggcaaatatccgctgcgtatgcgccattcctggggataaagattattggcacggttacctatattcttgacaaatcctagaggtatctgtttgtaagtgagcaagacaatgccgcgcggagcagtctccgaaaggacaacagcctccttgcgcagatagctgatggcctgctcgcggcctatctcttcatgggcaaaggcatccggattcagtgctatactcatggcgagcccatgagcaggcatccagtcttttcctttcaactcggcaacatctaccccagcctgcacgatacggagtgacgaacgcaaagccgacagttcggagagatacgctttagggaaagcgctgacgttgttgccattgacgataaattcgtaattatccggaaccgcaaaccactcatgcagtgccgaaagctgttctttggaaacacccggagttttcgctccttttccttgaggttttcttcctttttcccaggatttcacctgcccggcccaggtattcccatcgctcacgcccggtttgcggagaactgccaaaaagaatccttcccccttcgtccgatggggcaggaaacgataggcgggaaagtcctctcccgacaatagattacccgtaatattccagtcagtagaaatttccaacggcaatacctccgccccgaattcatcccgtatccaacggatgttctcttcgttttcctttgtattataggtacaagtactgtagatgagaatgcctccggacttcaagcaaggccagatatccgtaacgatgcgacgctggcgctgccagcagatttccacattctccccactccactcacttaccgcaacggggtctttacggaacatcccctcgccagagcaggggacatccgtcaatatgacgtcgaagaagtccgtcaaggaagaaaaatctgccgggtcattattagtgaccaccacaccggaatgcccccacttcgtaagattctccgccaatacctgcgagcggttgcggattacctcattggccaccagcagactgcctgcgggcaacacgctacgggcatgcgtggatttcccgccgggagccgcacagaggtcaagcatcaccaccggtccttcgcccacataccgcctcaaagcctgctccacaaacatagacgaagcctcctgcacatagtagcagcctgcatgaaacagcgggtcaaaagtgaatgtcagccgcttgtccagatagtatccggcagtagaccaagggacatgcctaaaagaggaacgaaaaagactgaatgaagattccggtaatttatcttcattcagtcggatactgaccggctgctccccttccagggcggcagccagcttttcatattcttccacacccaagagggcgcgtgtataatcggtgaaagatgagggtagcttcatgctttgaactgttttatggcagcaaagatagtgcaaaatacgtttcaccaatctacggggctaaacaaaaagcacggttcaatactctttttaaaaactgagtttcacccctgcaaaataggaacgcggtgcacccggtccgtagatataaccggaatcgcggctcgctcctttatcaaaatctttctgataagaattgaatatattctgtacaccggcattgagctgcaaacagaacccttgaaaatcaaagtcgtaagctatctttgttccaagctcaaagaagtccagactctttaccaatacatccgcctcaccgttcacctccgaaagcaaatggggaacgtacatccgcccggtataattgccgttcaaagctattgagaaggctttaaccggcatataggtagctgtaaagtagccgtagacgtcgggagtacgcagtatcttgtcgctgtaacgttctttctccgacaagtgctcctcatccgcactccattcttcgggagagtcatagatacttcgttgaagcgtcagccctgcctgcaactgaaccttatccttataggcaacctttccttccaatgtgccgccatacactttagctcccgaaccattgatacgggtctgtatcagataagcgctaccatccgggtctttcaccggaggcgtcaggacaaacgggtcggaaagtttcgtgtagaagccttccaccagtaggtttgcctggaaatctccgaaatagtggtaccaatctaccgaagcattgaagctgcgcgaacactcttccttcaatcctttggcgcggacaatggaaaccaactctccacccacattactgatatgcagatcttcatcaaacgcttgtggagcacggaatccctcagcataactgaaacggatattcacatcctgagtaggattgtaacggatattggcacggggactgaaaacagccttgtccatgatgctgtttttatctacgcgcccgccaatcaggaaactccactgttcgttcttccactcattctgggcatagacgcttgctatattcaccacttggttcaacggggcgggggtatatttctcaatcagttgttgcaagcggtcacccgttgccgtaggatcttcggccaaagcagcatcacgatacttctgtacgtccgttgccttgtcatgcagattgtcgtgattgaactcaatgcctccggtcaaatcggcaggcataaacagacacttgtcaaaatgataaatatactgggcacccagcacaccggtaaagtccgtagtcattccataagcgctgtaataactattgcgcacgatgtgctgagccgaagcataggtactgaacgtatgtttctggtttttggagaaagccgtgaacttgagcccacccgtgttgatggaatgtttcagctgttccaccagtccgggcgccccggtaccgttcaatccggcatcctcggctatatgagggggaaggctgaagccacttccaccacggcggaattcctccatatgatggtattcaaggctcagcttggaataggcacttgtccggtagtaagcattcagaccgacagtctggttcttcagcttcggtaattcggaaaaaccgtctccgttggagtcccatgccgaacgatgcctgctctggccgtacacataagcccccatcttactgtccgaagaaaccaaggaaagattcagggtcgtgttgttgtcgaacgagccggaaccgtcgaaattggaaatggtatgcgagaaagaaccggaattgcgaatcggttccttcgtaatgatattcaccgtcccggcaatggccgaagaaccgaacaaggctgaaccacctccacgcaccacttccacacgctctatcatgttggcgggaatctgttccaacccatacacaccggccagagaggaaaagatgggacgtgagtctatcaatatttgggtatatttcccatccagcccgttgatgcgcacttgtgaataaccgcaattctggcaatcggtctccacccgcacacctggctgaaaggccagtccttgcgacaaagtatgcgagtttgtctgctcaaacagtttaggagtgaccactttgaccaaagtgggtgccaagcgccgggcagtctcattgcggttggctgtgactaccaccccgtccagtgccaccatgtcttcttccaactcaaagttctcttccaaggtcttaccacgtttcagaacgactttgcgctcctgcgacttataacctacggcactgacggacaacgtgaactcaccttcaggcagattctttaggaaatagtgaccggtggcatcggtcatggtcccgatggtggtgcctttcagcgaaactgtcatataaggcaaatgttcccttgtacttttttctattacatgaccgacaatattggcatcggtactcttcaaatcttcggcataaacggttgatgagagtaacagacatactgctcccaccacaaaaaatatatattttttcatgtacttctaaaataatatgttaatcaatgaggttgacgcaatcccacaacggaattgccttaatctatcggatttgaaaaaaagaagggggagcacgcaggcaaataccgccacgaagctttacacacttgatgcattccgtggtaagaatgctcagtacacacaacaaaacaaggaaaaccgtcgcggcaaccggaagcaacggaagggaagaagagacgaaagaggctagatagaaaatggtttccaactgcacctctgtatgctcatgctggcccttgaatggatgggaatgcacaatgataacaccattcaccacatgcgagtgggtaaacagcgtaattcctcccagataggcaatgaacagcagagggaggaaacacttcattatattcctcaacttcatcaagacttcccaataaaaacagatgcgcaaagataacagtatttacaataagaaacaacccggtttgtatatttacctctatttacagtcgcaaatacctacttcttgttattccggaaaaaagacaataagacattttcacggaaaaatatcgccttatttccggttttctaaaaaaaatatcttctctttgcaactttataaaggtgacgacacgtctaaccaacaaagaaacaaattaaaagaccatagattatgaaacgtatcatttttggattaatactcgccatgatgttctgcacactggtgcaaggcgcaaacagaaccgtaacagagaacgacggtcaggggaacaagaaaagagtcatcgaattgagagacactgtcatcaatggagaaaccgtaacagacacactcagcatcatgacttatgaaaacggtaccggcagtagcgatgctccggaaaaatggagaacccaccacagcagtatggactggaacgggttcgacctcgggagcaagacctcggagaccgtgattgccgtaacagccatcgtctttgtattcggactgccgctactcatcatattcgtagtattcttcttccgctataaaaaccggaaagccaagtaccgcctggcggaacaggccctggccagcggacagcaactgcctgaaaacttcttcaaagaagccgcagcaacggatatccgcagcaaaggcatcaacaacatattcgtcggcatcggcctgttcatcttcctttgggccattaccggagaattcggtctcggatgtatcggcttactcgtcatgttcaccggcttcggacaattggtgattttctacagccaacagaagaagaacgaagaaaaatgagtcagatgggtgacatatcgttagtcgcacaggtcgtggtgtttcacaacaccagggccttcgaccagttggtaaagaagtaccagtcgcccgtgcggcggttcttcctgcaccagacctgcggcgacagcgagttgagtgacgacctggcacaagatacgtttatcaaggcctatacaaacatcgcttcgttcaagaatctgtccagcttctcaacctggctctaccgtattgcctataacgttttttatgattatattcgcagccggaaagaaacggacgatttggatacgtaccgagtggacgctcaatgcagcacactgcagcaggacgtgggacagcacatggacatttaccgtgccctggccacactgaaggaaatggaacgcacctgcatcacgctcttctacatggaagaccaaagcatcgaaaagattgcaggtatcaccggatgtccggcgggaacggtaaaaagccacctctcgcgggcgaaagacaaaatggcttcctacttaaaacaaaatggttatgatggaaaatgatgataaactcctgacttcattctttgccgaacaccggcaggaaatagccgataacgggttcagccgccgcgtactgcgacatctgcccgaccgtagccgccacttggcgcagatatggacagcattctgctttactctggccctcgtactgttcgtctccctcgacggagtgcagctgatactggacaccttgcgcgaaaccttcgatactgccatccggagcggagcttcggagcttgaccccaagtcgttaatcattgccggagtggtattgctctatttcggttaccgcaagatttcatctatggcatagttgtttttcaatgataaatcgtatctttgtcccctcataaaactaactaagaggagaaagttttgagaaagattctattcatcatattattcgttttttctattgggaatgccggggcgcaagcaacaagcgattccattgtcatgaattacttgaaggaaatgggcgcccccgtcacttataacaatgaagtgaaattgctgatgaccggccatgacaagttcgtcgatctcttcgagaatatccgccatgcccggcatcatatccatttggaatacttcaacttccgcaacgactccatagccaatgccttgttcagccttctggcagagaaagtcaaggagggagttgaagtccgcgccatgttcgatgccttcggcaactggtccaacaaccaaccattgaaagaacgccatctgaaatccatccgcgcccaaggcatcgaaatcgttaagttcgatcctatcacttttccctgggtgaatcatgccatacaccgcgaccatcggaaaatagtagtgattgacggaaagataggttataccggcggcatgaacattgccgactactacatcaacggattacctaaaatcggtaaatggcacgatatgcacatacatcttgaaggagatgccgtgcgctatctgcagggcatcttcctgaccatgtggaaccgggaaacgggacaacacgtaggtggacctgcctacttcccggatactcagcaactgcccgacagtattgccgaagaaatagccatcgtggaccgcacgccacgcgaaacaccacgctccatcagccatgcctatgcagcttccatacaagccgcacagaagagcatccgaatcgtgaatccctatttcgttccgaccaaatcaatccgcaaggcaatcaagaacgcactgaaaaaaggtactgaagtggaaatcatgatacctgccgtgtcggacatagcctttactccggatgcctcattctacatagcacacaagctgatgaagaaaggagccaagatatatctcttcaacggcggcttccaccattccaagataatgatggtagacagcactttctgcacagtaggtaccgccaatctcaacagccgcagcctgcgctacgactacgagacaaacgctttcatcttcgaccccaagaccaccaatgaactgaatgccatgttcgaacgagacatgcaaaacagtacgctgctcactcctgaagtctggaaaaagcgttccggatggaagaaattcgtaggctgggtgggaaacttgatgacccccttcctctaagtttttaatttttaattattaatctttaattaattcccctacctttgcgttcggataaaaacagagcattacatcatgaaacaatatttagacctgctgaaccgcgtactgaccgaaggcgtagagaaaagcgaccgtacgggtaccggcaccatcagcgtattcggccaccaaatgcgtttcaacatggatgaaggcttcccctgccttactaccaagaagctgcatcttaaatcaatcatatacgaactgctatggttcctccagggagacaccaatgtgaaatatctccaggacaacggtgtacgtatctggaacgaatgggcagacgaaaacggcgacctaggacatatctacggatatcaatggcgctcctggccgaactataaaggcggatccatcgaccagatcagcgaagctgtagaaaccatcaagcacaatcccgactcacgccggattatagtcagcgcatggaatgtaggcgatttggacaacatgaacctccctccctgccatgctttcttccagttctatgtcgccaacggacggctgagcctgcaactgtaccagcgtagtgcggacatttttttaggagtgcccttcaacatcgcttcctatgccctgctcctgcagatgatggcgcaagtcactggactgaaagccggggatttcatccataccttaggagacgcccacatctatctgaaccatttggagcaggtaaagctccaactatctcgtgaaccgcgggatctgccgcagatgaggatcaatcctgatgtgaaaagcatcttcgacttcaagttcgaggatttcgagctgatcaactataacccgcatccgcatattgcagggaaagtgtcagtataaatcttataatacctcaaatccgcaactacgcgcctaatatgatacagaagcgaaaagaatctgcatcgttagtaaaaagggggcacagtgcatcgaatgtcaccataaagacatataaatgccccttaccccaccatgcgacttgaggcaatacgcaaaatcacgactataagttgtcggtgttatccaaagtcattctggaacacattggcataagcattgttgcatgaatagatattcagcacatacttccttgatgtcctgacccatttggctggcacagagatgaacttaaagacaaacgtcttgatgcggcttgttgctttgagtccgaacctcttcacgtcaagcctcgccatgatgaatttatagaagttgcgtatgagtgccataagcagaagaaacaccgtgttttctcccataaaggattttggaagcctgttccagccgaatccgttattcatatcatcgaagatgcgttccttccctccacggaggttatagaattcgacaatctctttctcggaagactcgtagtcatttgtaaggatgcagcggtaggtgtattctccttcccacaggtcgagttcgccgtctatccgcttctgtctttgaatcacaagacggtatgccttccctttccatttctcgatgagaatggaggccagctcaaactcaatgccgcccaattccactttcttccaacctctgagggcaaagatgtcattgtagagcgaactgcatcggttagcacggatatagaaggtcttgcagtgtttagcaatctcttccactatctcttcagaacacgagccgcaatcagctctgaaacggttgataataagcttgttttgttcaaacctttcaaagaacctcttcagcgtgtccttctggtggaaacggacatttgtgttgccgtcgctgttctcaatgccgacaatcaagttgccaataaccgccacgccagggcgataaccaaggaacttcttgtatgtaggcttcgcatcaaacttctcagcctctatgaactggtggtcgaagtcaacgtcatacccctcgccctctttcagctgccctgtggacaataggcaattgaggagcagtgtattcagcttgtctgccgtgttgaagtcgtaggtcttgccagtgtcggatgtgtaggaaatgttatcctgggtcagttcctttatggctctaagaatcgtgtcggcactgcatgtgcgaagtgtcggatgaagcgaaaggtggtacatcagatgagtggtgacatcctcgatgcatgagccgccacaaaaataaacgctcataagcgaacggatgatttcgctgtattgataaccatacagcctgcatctcataccgagggttgagtcgattacagatgagagtctggagtcaaattgctccattattgaaaatattcctccaaaaggagtgagtttctcggatttaattgctacctttgccatgtctgtcgggtttgatacatattttgatttgcaacactaagataggtgaaaaatctgacatggcaaattcctgagcaactttttgttgctcaggtacttaaaaagttatatttgtaatagtgttgcggaattaaggtaataaaaagatagaaagagaaaagaattttacacacatatgattagtattatcgccgcagtagatagaaagagaggtatcggctatcagaaccgattgctattctggcttcccaatgatttaaagcgtttcaaagccctcaccacgggaaataccatcatcatgggccgaaagacctttgaatctctccccaaaggcgcgcttcccaaccgccgcaacgttgttctgtccactcaaaaagatttgctctgtcccggtgcagaagtttttccctcactggaagaagcactgaacagttgccagcccgacgaacacgtctacatcatcggcggtgcaagcgtttatcgccaggcactcccctttgcagataccctctgcctgaccgaagtggatgcagaagcccctcaggtggacgcctactttcccgaagtcgctccgactgtatggcaagaaaaaagcagggagtcccatcccgcagatgagaagcatccctgcccttatgcattcgtcgattatatccaccggtaaaattaatcttcctcttcttctaccgttataggcatctgccgcttgatggcttcgtggaaagaaatcaaggtttccgtacgcgccagtcccagcggctgcaacttatcatgtatgatgctcagcaaatgatggttgttgcgggcataaagctttatgaacatatcatacttgcccgttgtaaaatggcattccacaatctcgggaatagcttccaatgctctcgttacagcatcgaaggaagcaggatcctttaggtagataccgatataggcgcatgtttcatatcctatcttctccggatcaatcacatattcagaacctttcaatatacctaagtttgtcagcttttgaatgcgctgatgaatggctgctcccgatacattacaagctctagccacttcaaggaaaggaatgcgtgcattatcggctataagttttaaaatctgttcgtctaaagtatccaactgatgatgtcccatttcaaattctaatgattaataaattactatatctcccgcatatctatacggcaacatgcaaagttagctattttttcgccaataaaaatacggtttataacttttcttacaaaaaaaagaataataccgcatatcaggcatttcaaagtgcatatgcaaaattccatctcgcacgaccggaaaattgcagatgagctttaaagatattatctttgtagtagcaataataatgaaccgttatgaaaaagtattccttattcctattatgcctgatggcagcaatatccttgcatgcccaaagttttgcagattattttgcagataaaaccctgcgtgtcgactatatctttaccggaaatgcagccaaacaagagatatgcctggacggattgtcttgtctcccctcttgggcaggaaggaagcatcatttatctgagttgcccctgcaaggaaacggacaaatcattatgcgagatgcagccaatggcagcgtaatctacaaaacatccttttcttcgctcttccaggagtggctggaaacggatgaagccaaagcggtgaccaaaggattcgaaaacacctttctccttccctatcccctccgtcctgcagaaatagaaataacacttctcgacccgcgtagaaatgtacgggcaagcatgaaacatacggtcagtcccgacgacatcctgatacatcagaaaggtactgcccacatcacaccacataaatatctgctgcaaagcggcaatacggccaaatgcatcgacgtagccatccttgcagaaggatatactcccgaagagatgccggtattctacgaagacgcagccattgcctgcgaaagtctgtttgcccacgaacccttccggtccatgaaaaagcacttcaacattgtagcagtggccagcccctccgaagacagcggagtaagcgtaccacgcctcggagaatggaaacggacagcattcagctctcatttcagcacattctattcagaccggtatctgacaacctcccgtgtcaaatccatacacgatgcgctggcgggaataccgtatgaacacatcatcatccttgccaatacggaagaatacggaggcggtggaatctataattcctatacccttactacagcccaccatcccatgttccgccccgttgtggtacatgagttcgggcatagctttggcggactggccgatgaatacttctacgacaatgacgtgatgacagatacctatccactagatgtggaaccctgggaacagaacatcagcacaagaatcgatttcacttccaaatggaaagatatgcttgctcaaggaactcccgttcctactccctcttctgaaagtggaacatatcccgtaggcgtatatgaaggagctggctattctgccaaaggcatctaccgtccggcagacaattgccgcatgcgcaccaatgaataccctactttctgcccggtctgccaacgggccatctgccgcgtcattgaattttatactgaataaaaacaaactaaactaaaagaacttatgatcagacttcaacgtattacaacagctgacacagacttgtacagctacatggagaaattaatgactcaatcgttcccttcagaggagtaccgggaactggaggaattgcgcaagtatacagataccaaaacgcacttctataacaatatcatcttccataacaacaccccggtaggtctcatcacttactgggatttcggacatttttactatatagagcattttgccattgaccccacacagcgtaacggcggatatggaaagagtgtactgaaccatttgtgccaactcttaaaacatcccattgtcttggaagtggaaatacccgaagaagaaatggctaaacgccgcattaacttctatcaacggcaaggattctccttatgggaaaagccctaccaacagcctccctataaagcaggagacaactacctgcctatgctcatcatggcctatggagatatagaatgtggaaaggattttgaccttgtaaaggaacacatctactgcgaagtatataatgtgaaatcttaaaaatccaatatacttaaaacaataaaggtcgtttcaacaaatgaaacgacctttattatatcattaaatcaactcttactgacgcggttgcgcagaatagttaatcttcaaagcataagcttgacgaagagcttccttgatatctgttacgatacccattttcgtatcttggtcaactttcaaagacactgtcatctgcggctgatcttcttctttcatactggcacgttcaccaataatgtaatcttgaatttcagcaacttcagcatagctgtcgttcaactggatacggctctcattacctaacttcttacgaaattcggcagtaggttttcctacatagataaacgtaaccaaagacttcttttcaagtttctccaattctgtagcttgcggaaccttaaactcaacctttaatgttacctcacgcatagttgttacaatcatgaagaagaacaacaaggtgaaaataaggtcaggcagagaagaagtgttcaacgccggcatttcacgtttaccagtcttattaaattttcccattacttcttttctccgtactttttaggttctgcctcagaaattctctgaggataaatatcacgaattgcatcttgttgttcttgatccaactcgacataattcttctgccacttctcctgagccagttcatcgcgtaactcattgtaagccgctaccaactcattctgtacagccatatatgccttataggaagaaccacggtcacaacgcaaagaaaccacatgattttccgttacttgaaccgtaccaaagaaaggaacattcttagaaatcttttctggcttcgtttcatcattatacggattggcaatgaattcctttgcctttgcacgcaattgttctacgttaatataatcgttaccgcacattaactggtcattcatattcaagaagacttgcaaaacgttacgttctttcttcttctggtcctcaatcttctggtctttttcgggtggaggcggcaaacgtcttgccaaaccacggtcagtatccatagatgtcgtgatcaagaagaaaatcagcaacaagaatgcaatatccgctgtagaacttgagttaatatcaggaacttttctttttccttttgccattgtaattactctttaaattgagttacctcaatcagttatgataatttcttcttaatactactaaaaatgattgccaacactgtaccggcaaacaaaatataaatagaatagaggaacatatcggtaatcttcaaccagaaaggaacattgtcagtaccgctatatcccggaatagtaagcggctcatcgctacccatagtccaagctataaccactacaacaatcaatacaatcaagccgattaaagatttcaaggctgcccccggattatccttcaaggcagatccgaattggaacaatacaccaaccaacgtagcaattacagctacagccaacagagcatacgtcaagtaaatcaatgcatctgtctgagccggttgccacatttctgagtcaacgctcatcaatactgcatcaccttgagcatctccaccgaagtagaacaagcccagcactaccaagatgatagcgaacatggcatacagtacgtagtatgatactttatatgataacttagccatcttaattattttttgtatttcaagtcatatttgataaccatatccaacagtgagatagaagaatcttccatttcacttgtcaaagcttcaatcttagacaagatatagttgtagaatacctgcagaatcaaagcaacaatcaaaccgaagatagtagtaatcaaggcaaccttcataccacctgctacaaccgtcggagagatatcacctacctgctggattttatcaaaagcctgaaccataccgattacagtacccaagaatcctaaagacggagccattgcgatgaacaatgtaatccaagagcaacctttttccagataaccggcttgtacaccaccgtaagatactacagacttttctactacgtcgataccttgatcgattctcatcagaccttgatagtagatagaagcgataggacctcttgtgttacgtgcgatatctttagcagcctcaacgtcacctttttccaaagcagcttcgatagcagccaagaacttctttgtattaatttcagccaagctcagataaatgatacgttcaatacagaatgcaagaccgataaccaatgcgatagctaccaaactcatgaaagatgcagtaccttcaataaacttagtcttaagctctttgtggataccaccctcggcagcttccatagcagcaggggcagcagcatcagcagcaggtgctacagctgcttgttcagtttgttcagctgcaggagcatcttgagcctgagcaagttgagttgagccaaatgttaagactcccatcacagcaacaattgcaaataactttttcattgtgtgtctaatttttaagattaattaattaatttatttattataatttgttgttttatcttcatttcatcacactgcggagagacggggattcgaaccccggataccctttaggggtatacacgctttccaggcgtgcctcttcaaccactcgagcatctctccaatagacgccttttctgaaatcgggtgcaaattacaaaaaaaatgcgaaccacaagcgttttcagctacaaatgtattcttttttttgttgttctgcttcattcgacccgttttatattaaataaaatctcaaaattaataaactttaaaatctcaaagagcttatttgagcattccgaacacttttaaagtgttatcagaagtaacctgggccaccttttcaggagagttcccataaattccggccacctttaccaaagtatccttaacatatgcgctttcgttcctcttgcctcgattgggaaccggagtcagataaggggaatcggtttccagcacgatgcgttccaaaggaatattcttcaagacttccggcaaagttgattttttgaaagtcaccacaccatttattcctatcatgaaatccgcaaattccataatcctgcaggcctcttccgaggtccccgtaaaactatggaaaattcctttcaaaggagtctgctgatagggtttcaacacattatatatatggtcgaacgcttccctacaatgtagcactaccggcaaaccgtattccaaagcccactcaatctgcctgtccaaccccctttgctgttctctgagaaaagttttatcccaatacaagtccataccaatctcaccaaccgcaacaaattcattcggtgaagccagctcccgggccactatttccaactccttttcataatccgcacccacagaggtagggtgcaatccaatcatcggatagcaataccctttatattcacggcacacccgaagcataggtcctatggtggtactatcgatattgggcataaaaatatgcgtgactcctgcctcacgggcacgagccatcacttgaggcaaatcctctgcaaactcttctaaaaaaagatgggaatgtgaatcaatcaatctcattcttcaacttactctttgcgtttctcaccggtacggtaataatagattattccataatcacggcataaatccaaacgtttctcattgggagtgacctcctcgaatttcttttcaacctggttccatatatccaaaatcaaaccatccgcctctgcacgcatcgaagccaaggtgtccaaactgcgggctgtcaaagattgaagattcttttgcttctcataactatccatgaaaatatcataatgcaccctcacttttgcaatcgtagggttataaatgggaattcctccctgggatatacgtttgttttccccatccacgattttacgcccccactctgccaaggcaggctctgtcgataaatcaggcacattattgttgcttgtgtccaaaccgtaatattccttatgagcaatacgcacttcagaacggatgacagctaaattcaacacctggataaaatgagaaatatacagacgggcagtctttacattagcctgatgcttacgtcccgcccgagcctgccgctcaaaacagtcggcataataagcttgcgcagcttcaaactttgtaagaaaattccgcgcatcagtcaacgccttcaaagatacggccaaatcatacacattacatatatcacccttgacgaccactgctttcagcgcccgtattctcgcttgatctgtattaggcaatcttctataaggcattttctcccggatttaaagttatacttcccgatgcatcaggttagccatcaggttcttcaattcctctttcttttcatctgccaccttcaccgccaacagactttccattgcgcgttcacaatactcttccatctttttctcacacagttccttgacgccaatccggttatacagttccgtcaccgcagcaactttctcctccgggttgaatgcaacagcatccacccaagcattcaagcgggtcaactgctcctcatccgcatgttcaaaagcctttatcagcatgtaggtctttttattgcacagaatatcacctccaatattctttccaaagacggcagcatcgccataaacatccaggaaatcatctttcaactgaaaagcgacacccaagttcatgccaaaatcatacaactgctccgcatcttcagaagaagcccctcccaaaagagcgccaatcttcaagcttgcagccaacaataccgaagttttcagacgaatcatttccagatactcctctgccttcacatccttccgatgttcaaactccatatccagctgctgtccttcacagatttccagtgcagtcagactaaatatatccattacctctttcaggcattcaaccggacattgagccataaactgataagccaatacaagcattgcatcccccgaaagaatggcggcattgtcatcccagactttatgtactgtctccttgccacggcgacggtctgcatggtccatcaagtcgtcgtgcaaaagagtataattatgatacacttcaatccccgttgcagggttaaaaatacgggtaatatcctcccgatacagattgtaggccatcaacatcaataccggacggattctttttccgcccatggacaacacataggtaacgggagcatataaaccttgaggagtacggacaaactgcaattctgcaatatgagaatttattctttctaaaagctcggaggctgtaaacatggcattttcagaatttaggaaatagcggataatgaaaagaggctgcattccggcagcctctcccacttatagatattttattactgcaatctaaacattacaggcacggtatacttaacgcgaacgggtttaccacgctgcataccgggtttccacttcggcatgcccataatcacgcggacagcttctttgtccaagtacgggtcaacacctctcagcaccttagcatctacgatactaccgtccttattgaccacaaactgtacagttacacggccttgagttccgttttcctgtgcaatagtaggatatttaatgttcttgctcagatactgcatcaaaccggccataccaccgttcgggaattcgggcatctgctccaccacctcgaaaatagtctgttcttccggttcttcctcttccactgctacgggaacatatttgatttccacagcctgattcaattcctcagaagatacgatggcagtttcttccacgtcggcatcgtcctcaacgatagtcagcgtttctgcaatcgcaggagcttcggggggcggaggagtaacctgctccggctgttctgtaatagggatgatttcctcttcaaatactaagtcggtaatagcctgactcgtatcaatcttgatgtcacgctttgtccactcgaacgcaacaaacatgaaagcgagcacgattacataaccgacaagcagccaagtcgacttcttactctccaggtctgccttaggtgatttcttaatttccataatttataatataattttagtgtttctcatttggggcaaatatagtacttttcccaagaatgttcacgctctgctgtttttttttacacaacagacgttcctttttcatttttttaatccttcaaaagcctccacatgcttttgtgccacaaatgtaacgagatattttaaaaataccgtatctttggcaagaattttaaatgaaatattgaaattttctattttgcaggtgttatacctgtataactatagcataaaagtcatgaaaaagataacaatagcaatcgacggtttttcctcttgcgggaaaagcactatggccaaagacctcgcccgcgaaatcggttacatatatatagatagtggtgccatgtatcgggcagtaacattatatagtatagagaatggtattttccagggtgaccgcatagatgccgaaaaactgaaaagtctaataaaggatatacatatttctttccgcctgaaccccgaaaccggacgcccggatacctacctgaacggagtaaatgtagaaaacaaaatccgtaccatggaagtatcttcacgtgtcagccccattgcaacattggatttcgtacgcgaagctatggtggcacagcaacaagagatgggcaaggccaagggtatcgttatggacgggcgcgacatcggcactaccgtttttccggatgccgagctgaaaatttttgtaaccgccacccccgagatacgggcacaacgccgctatgacgaactgaaggccaaaggggaagaagccagctttgacgaaattctggaaaatgtgaaacaacgggactatattgaccaaaaccgggatgtaagtccgctgcgcaaagcttctgacgctttattgttggacaacagccacctgagcatttcccaacaaaaggaatggctggcggaacaattcgaacgggttacaaaggagaagaactgaaccggatatggcaaaagtagaaatagacgaaggctccggcttctgtttcggagttgtcaccgcaataaacaaggcagaagaggaactggcgaaaggaggaaccctctattgtctgggagacatcgtgcacaacagccgtgaagtggaacgcctgaaggcaatggggctgattaccatcaaccatgaggaattcaaccacctccacaacgccaaagtgctgctgcgtgctcatggagagccccctgaaacttatgacattgcccgccacaacaatatagaaatcattgacgcaacctgcccggtcgtactccgcctgcaaaagaagattaagcaagagtacgtccaggaagacaaccgcgacaagcaaattgtcatctatggcaaaaatggacacgccgaagtactgggtctggtaggacaaaccaccggaaaggccatcgtcatcgaaaagcaggaagaggcaaggaaactggatttcagcaaagacatccgtctctactcccagaccacaaagtctctggacggatttcaaaacattgtgaaatacatagagggacatatctcaccgaaagtcactttcgagtcctatgacactatctgccgacaagtggcaaaccggatacctaatatccggaaatttgcagcttcccatgatttaatattctttgtcagcggcaaaaaaagctctaacggcaagatgctgttcagtgagtgtaaaaaagtcaatgccaattcacatttgatagacagtgccgaagaaatagatagttctctgttagccggtgccaattccatcggtgtctgcggagccacttccacccccaaatggctgatggaagaaatttcagaagccataaagtcaaaacttaaataacagtttgtcatccttttggaacagcaaattaacgtaatttattagtcaccgcctcagctttttactatctttgcggcatgaaaaaatagtccaaatctatttttcatcatgattattaatactaaacaaaaagattgttatgggaacagttaagtgcattggtatcttgacatcaggaggtgatgctccgggaatgaacgcagccatacgtgccgtgacacgctctgctatttacaacggactttcagttaaaggtatatatagaggttacaaaggtctggtaaccggcgaaatcaaagaattcaaaagccaaaatgtcagcaacatcatccagctgggtggtacaatcctgaagacagcccgctgcaaagagttcacgactcccgagggccgccagattgcttacgacaacatgaagaaagaaggcattgacgccttagtgattatcggaggcgacggttcgctgaccggtgctcgtatctttgcacaagagtttgacgtgccttgtatcgggctgccgggaactatcgacaatgacctttatggaacagataccactatcggctacgacaccgcgctgaacacgatcctggatgctgtggacaaaatccgtgatacagccacttcccatgagcgcttgtttttcgtagaagtcatgggacgcgatgccggtttcctcgctctgaacggcgccatcgcctccggagcagaagcagccattatcccggaattcagtacggaagtggaccaactggaagaattcatcaagaacggtttccggaaatccaagaacagcagtatcgtactggtagccgagagtgaactgaccggcggtgcaatgcactatgcagagcgtgtaaagaacgaatacccccaatatgacgtacgcgtaaccatcctcggtcacttgcaacgcggtggtagccctacggcacacgaccgtatccttgccagccgtctgggcgcagccgccatcgacgcaatcatggaaggacagcgcaatgtcatgataggcattgaccacgatgaagtggtatacgttcccttcacgaaggccatcaagaatgacaaacccatcaagaaagaccttgtaaatgtattgagagaactgtctatctaatgacagactgttcagataccccataaacagagaaggcgacatatgcgccttctctgttttttacaaccattttttcactatactttccgtcctctcccacagttcttccatctgtacatgccgggtgtacttctccgaaagagacttgggacggcaactggcattcaatgtacccgtacgtttaccggcatcctcatccagcaataagccgacagctgttgcagctcccttacggggagtacggataaaaggcctgaaaagtatatctgtcagcgggtcaaaccacatatgcatggtaatgatattggtagacacaatccctggatcagccgcattcacaacaatacctttgtgcttgacacgactggccaagtcgatggtgaacagagtcaatgccagcttcgtgttgctatatataggaatgcgccaaaagccacccttctttccccggaggaaaaaatccggaaagtcaagatgaccgatggcatacgtacaagataccatattcacaatacggctcccctctcccatcaatggcagcagcttgcgggtcagcaggtaaggccctacataattgacactcaccgtccgttccagtccgtcttcggtaatgcggcgttccgtttccatagttccggcattgttcatcagcaatgccaacggctctccccgcttcaacagatgctctgcaaatgcggccactgaagccagagatgccaaatcaacgggagcaatctcaatacgcggattaccggtttcacgcatcagcagttgccgcttgggttcggcagtttgagggtcacggcatgccatgatgacctgatagccggcagttgccactgcgcgggtaatttccatgcccatgccaccgtctgccccggttataacagctaaattcactttaataattaaaaattgaaaattaaaaactaaaaatcagcctttcgcttcgattttctctatctcctttttcagacaaggtggaagctcctccttcaaatgctgatggcatgccatctcgatggaatacatccgggcaatgcaataattactatgccggcagttgcaacgtgcattctcttcggcacgcatgcggttgacgaaccccggctcattgagcagagcgcgcgccatttgcacagcctcgaagccgtcatccagcacctcatctatcttatccctggaaaccaggccacccacataaaccaacggtatcttcaaggcggcacggaatttcaaggcatcttccaggaaataagcttccttaaacggtacgctcggtatcatccatttgcctaccatgcgtacaccgtatttcaaccaccagcaggtcatgtaatgcgtcatgctgcggataggcatttcgccccgcatgacatacatcggcgccttactgacgaacccaccgctcaagaccagcgcatgtgctcccgactgctccagcctccgggccacctgcatcgtctcgtccagctccatccctccacggaaaccgtcgcgcatgttcatcttcaccagcacagccatatcactgccggcagccttcatcacttcttccatcaccatatccataaaacgcatacggttctgcaacgagcctccgaactcgtctttccgatggttggtggacggggacaagaactggctgatgagatagccatgccctgcatgaatctctacggaatcaaatccggcctcccgtgccagattcaccgagcgtccgtatgcacgcgccatctccggcagctcatcggcacaaagtccgcgcacaaaggtaggagaataaagattgaatccggaagatgcgccgacgggcatacaaccgcaaatacttttatgggacatgttgccacagtgtcccaactggatgcctgccgcagccccttccgcatgtatggcatcagtcagcctacggagtccggggataatctcgggacgcatccacaactggcggtcaaaagacaggccgctctgagtaactgccgcataggcaacagtagtcatacctataccacccgccgctaccgaccgatgatagtcgagcaacatgtccgacggagcgtttccgggacacatgctctcgaaagcagccgaacggatggtacggttacgcaaggtcaacggtccgaaagtgacgggtgtgaataactgggattccatcgttatgagttatgagttatgaattataagttatgaattattcattttccattttcaactttccattttccattaataaagaaatggaatgatgcgtttgcgctttcctaccgcctcatcgccaaactcctcccgataacggcggtgaatggcatcggcacggggaacaaggttggcaaacgtccaccagacgaacacccaagcggcaggggaagctgtgagtatggcaaacccagtccattccaccagctcaccgaaataattggcagaagtgacatatcggtaaagtccttttccgggaaggtagtgcttcgtatcacccggcttgcgcaaatggcgtatcacgtagtcggaatgcaaattgacgagcatgcctgcaaaaaacaagatgattcccaacaaggcatgaggtttcagcaaataggcacagccatcggcatacagcccttcgggagcgaaatagaacaaaccgcccgcctgcatcatcccgttcaaaagattgaagactattcccatcgccataatcgccaccggcatccgactcttgcctttcagcaggaagggaaaaacaaaggcccgctgaagatagtgcaactgaaacagcaggaagaaaagatataccggtatggaaaatcctgctccgctctttccccacaacccaaacatgacgatgaataccggcgcttccataagcacccatgccagtttattattgatggaaattccccacgaagcagtacggaacatgccatagcctgccttgacaaaatagagtgcaataaagacagccaatgccacagcactcattacccacagaaatatctgaaaagtttcctgattcatagttctttatttatgcgaagcaaagataaagaaaactcacaacaaacaaatcgttttctccggataaaattgttttttcatacaaaaaccagcgttttttactgagaggattaagcagcagagatacgaaagcctaatcgttccatcatggagtaaaattcattccaccatggagaaaaaatcgttccaccatggtggaacgatttttcccccgtaatggaacgatttaaaagatacaagtctaatccttaccgtttcttaatgggcacataagtcacctcatccaaaacattcttataggcaggacggataatacgcttgccttcgaagttcaattcttcattgcgatgagcacaccagcctacaatacgtgccatggcaaacaaaggcgtgaagatttcctgcggcagcccaatcatctcgtaaacaaagcccgaatagaaatcgacattgctcgaaacagtcttcccattattcttcacacggccaaacacatcaatggcgcgctcctcgagcagttcaaggaaagcgaactctcgttccttccctttctcgcgggcaaggtcgcgggcaagctctttcagaagaatggcgcgcggatcggaaatggtatagacggcatgtccgataccatatatcaaaccggtcttgttataggcttccttgttgagcatgcgggtgaagtaggtatcaatctcatccacattcgtccagtcctgaatgttttcctgcaagtggtggaacatatcggcaacctggatattggcgcctccatgaagcgggcctttcaaggaaccgatacctgccgctatcgaagagtaagtatccgtcccggtagaagaagtgacgcgtacggtaaaagtggagttgttaccgccaccatgctctgcctgaagaaccagcagcaggtcgagagtgcgggcatccagctccgtatagtccttcttcagcatataaaggaagttctcggcaatggaaaggtcttcctgcggatggcggatatgcaatgaacggccatgggtggcatggcggagcatgttataggcatacgcgatgatggtcgggaatttcgaaataagctcaatgctctggcgcatcaggttgtcgcgggaagtgtcatcggcatccgggtcgaaacggtacatctcgagcacgctgcgcgccaggatgttcataatgttgtttccttcaagttcaatgatattcatcttggtcttctgctccagcggcatgttgtcgttgatgagttcacggaaagaagagagttcttccttgtcgggcaggcgaccggaaagcagcaagtaggcaatttcctcaaaaccgaaccgtttctctttgatgatggcgtgtgccaagtcgtccacatcataaccgcggtagaacaatttgccgggaataggcttcagccctccaccggggatgcgttcatagccaaccacattgcctattttggtcaaccccaccaagactcccgtgccgtcctcattacgcaaaccgcgcttcacatcaaacttcctgaacagttcattctcaatccgggtagcttccttcaaatcttcggaaagcttgtaaatcagatactccttcttcattatcgtttcgttttattcgttattcccattttctattctccttacaatctcccgggtgaaagtcgaagtggacagcgagacgccacccggcataaaacgggccaagtcggcagtagcacgggcttctgtgaaactttcctccaaggcgttctctataagagaggctgcttccttccaacccagatattcaagcatcatcacagcggaaaggatgatggaacagggattcacaatgtctttcccggcaatgttcggagccgtcccgtgagtagcctcaaaaatggcatgccccgttttatagttgatattcgcacccggtgcaatgccgatgccgcctaccatggcagccagttggtcggacacataatcgccgttcagattcaacgtggcaatcacggaatattcttcggggataagcaacgtgttctgcaagaatgcatcggcaatgcagtccttgatgaccagacgcccttctgccagttctttaccaaactcacgttctgccagttcgtacccccacttcttgaagccgccttccgtaaatttcatgatgtttcctttgtgtaccaacgtcacggaaggcagatgatgctcaagggcgtattggcaggcggcacgcaccaagcgctctgttccttctctcgaaacgggcttcacgccaaacgaggaggtttcgggaaaacggacttttgtcacccccatgtcatcacggagaaaacgatagaacttttcagcctccggagttccggcttcccattcgatgcctgcataaatatcctcggtattctcacggaatacgcacatatccaccttctgtggctctttgagtggagaaacaatgcccttataccaacgtaccggacgttggcagacatacaaatcgagcgtctgacgcaaggctacgttcaaggaacggatacctccaccgacgggagttgtcaaaggacctttgatgcccaccttataagtgcggaaggcttccatcgtttcatccggcagccaggagccggtttcgtggaaagcacgttctcctgccagcacttctttccattcaatgccacgccggtcaccataggatttcctgacagcggcattcacgacagcctgcatggatggggtcacttctgctcccactccatcgccggtaataaaaggtacagtaattttttccatattctatcttgcattaagtgcagaaccggcccggaaccaagctatctgctgttcgttatacgtatgttgtacttcaaaactttctttactcccatcctcgtgatgaagaaccaccttcaacgtgcgtcccggagcaaaatctttcagccccatgacagaaatcaggtcgcgttcccgaatcttgtcataatcggccttatccgtaaaggtcagcgccaacatgccttgtttctttaagttcgtctcatggatacgggcaaaactcttcgccaaaatgacgcgtacattcaggaagcgcggttccatggcagcatgctcacggctggaaccttcaccataattctcttcggcaacgaccatggaagggataccttcggacttatacagcttcgcagtgcctgacactgttccataggtattggtggagcggttccaaaccttgttcgtctctccattgaaagcattgacagcccccatcagcatattgtccgaaatattctccaaatgtccccggaaacggagccatggccccgccatggaaatgtggtcggtggtacatttcccctgtactttaatcaataaaggcatgtccagcaaatccatgccatcccaggcagggaagggagtcagcagttgcaagcgctgtgaatgaggattgaccgtaatttccgtctgtcctttgcctggagcaatgtatccttcctttcctcctataaacccgtgtgccggcaattcttcaccgaccggttcggacagtttcacaacctctcctttggcattgaccagcgtatccctcaacgggtcgaaacaaaggtcaccggcaatggtcagcgccatcgttatctccggggaagcgacgtaagcaaaagtgttgggatttccatcggcacgtttggcaaaattacggttaaaagaggtgacgatggaatttttgcgttcggggtcatcagtatggcgcttccactggccaatacaaggtccgcaggcattcgccattatcgttgcgccaatatcttcgaaagcggcaatcatgccgtcgcgttcagcagtggcacgtatctgctccgagccggggttgacaatcagcgaggaagcaaccttcaaattcttttcctttacctgccgggcaagggaggccgcgcggctcaaatcctgataggacgaattggtgcacgaccctatcagaccgacttccatccggcggggatagttattggttatcactacctcggcaaatttcgatatcggtgttgctgcatccggcgtaaagggcccgttgatatacggttccaataacgagaggtctatttcaatgatgcggtcgtaatatttttccggatttgccagcacttcgtcgtcggcgcgaaggtcggcagctacggaagcagccatttccgccacttcttcacgtccggtagctttcaagtaggtacccatacgctcatcgtaagggaaaagggaggtagtcgcccccacctctgcccccatattgcagatggtagcctttccagtggcagacaatgaagcggttcccggtccaaaatattcaatgatggcattggttcccccttttacagtaagaatacccgccaacttcagaataacgtctttgggagctacccagccactcaatttacccttcaagtgtacgcctatcagacgcggcattttcagttcccattccatgccggtcatcacatccaccgcatcggcaccacccacaccaatggccaccatgcccaaacctccggcattgggcgtatgagagtccgtgcctaccatcattccacccggaaatgcgtagttctccaataccacctggtgaataatacctgctcccggctgccaaaaacctatgccatagcgggaagaaacatcacggagaaaattatagacctcctcgttggtcttcgtagcagtcgcaacatcttcttttgcacctttatatgcttgaatcaaatggtcacaatgcacagtggaaggcacggcaacctgctcacggcctgcattcataaattgcaataaggccatttgagccgttgcatcctgcatggccacacggtcgggacggaaattcacatagtcttctccccgtctgtagttcttcactttatccccatcatacaaatgagcatacaaaattttctccgctaaagtcatcggacgccgcagtacgttccgtacgcgttctatcttctccgaataagcagcataaaacgttttgagcatcgttaaatcatataccataaccactattttttagtttttcattattgtaaagattacaaattaatatcataaacaaataaaaaggctgaatagtttaacaaaataaagcattttttccgtcggaagcgaagaatgattacctttgcaaccatgaaggaacaagattcaaatagtcctattattcacctccagcagcaacaagttttgctgcgcatggaatacgaatacgaaaaagaggaattcaaacgccaaaccgaaaacatgggagttgcccggaaagtgaaacggggactttgctggtatcctgccactccgggacgaagttactataattcactgaatcaattagtaatagaaattacacacacagaaaataccgatatagaacataattttgagttcggccgtcccgtatgttttttccgccagtctgccgatggaaaaataacctatatgaacttcaccgctaccgtaagctatgccgacgagacacggatggtagcgataatgcccggagccggtgccgttatggaagtgcaggaaacggacaacctcggcgtgcaactttatttcgacgaaacatcctatcggaccatgttcgaagccttggaagatacgttacgctccaaaggcaaccgcctggccgaattgcgggacatattgctgggaacctcgaaagccggtttccgagagctctatcccgtacggtttccctggctgaactccacgcaggagacagctgtaaacaaagtgctgtgtgcccgcgacgtggccattgtacacggtcctccgggaaccggaaaaacgaccaccttagtggaagccatctacgaaaccctgcatcgggaaccgcaggtactggtatgtgcccaaagcaatactgccgtcgactggatttcggaaaaacttgtggaccgtggcgtcaatgtcctgcgtatcggcaatccgacccgtgtcaacgacaagatgctttcctttacctacgagcgtcgtttcgagaaccatccgctttatccggagctgtggagcatccggaaaaatctccgtgaactgggcagccgtgcccgccgtggcagctatgacgaacgcgaaggagtacgcagccgtatgagccgcctgcgcgaccgcgccaccgcattggaaatacaaatcaatgcagagctttttgatggggcacatgtcatagcctccacgctagtaagcagcaatcaccggctgctgaacggacgccgtttcggcacccttttcattgatgaagcagcccaggccttagaagctgcctgctggatagctatccgaaaagcagaccgcgtggtgttggcgggtgaccactgccaacttccgcccactataaaatgctacgaagctgcccgtggaggtctggaacgaacattgatggagaaagtggtgtccaacaaacctgccgttgtctctttgctgaaagtacaataccgcatgcacgaggaaatcatgaaatttccttcccaatggttttataatggcgagttggaagccgctcccgaagtgcgttaccggggcatcctggactgggatacccccatccactggattgacacctccgaaatggatttcaaagaagaatttgtgggagagactttcggacgcattaataaggcggaagcggacctgctcctatcagaactgaaaatctacatcaaccgtatcggtggcaaccgcattctggaagaaaaaatagacatcggcatcatctccccttacaaggcacaagtgcaatatctccgcagcaagataaaggcagacgcttcactcaagccttatcgcagcttgttcactgtaaatacggtggatggcttccaagggcaagagcgcgatgttatcttcatcagccttgtccgtgccaacgaagaaggacagataggattcctgaatgatttaaggagaatgaatgtagccatcacccgggcacgtatgaagctggtgatattgggagaggcagagacgctgaaacatcacggtttttaccggaagctattggagtttattcaaaatatagggaatcaataataaagaaataccccctccggtaacaccgaagagggtatttcacctatttatataaagctgattaattgttttccggacgaagtttacgaactgtaacagctgtctgccacatttcgctttcacgcaaggctttcaattctgcattcagcttctcacgataatcgggtttggagttactgtcgatagaaatctgagcttcgttgcccgacttcacacttgcatacaatttctgtacaaccggcttgatggcatcatggaacggggtcatccaatccagcgcaccacgctgtgccgtagtagaacagttggcatacatccagtccataccgttcttggcaaacaatggcatcaaagattgagtcaactcttccactgtttcattgaatgcttcagaaggagtatggccgttttcgcgcaatacttcatactgagccaacagcaatccctggatagcacccatcaatgaaccgcgttcaccggtcaagtcggaagtggcttcgcagatgaaagttgtctcgaacaaatatcccgaaccgataccgatacccagtgcaatcgtcttgtcaaaagccttacccgtagcatcttgatagacggcatatgatgagttcaagccacgcccttcgaggaacatggtacgaagtgaagtaccggaacctttgggagcaaccataataacatcaatatctttaggaggaaccacgccggtacggtcgttccaggtaatagcaaaaccatgagagaagtaaagagcctttccgggagtcaaataaggtttgatagtcggccatacagacattacagctgcgtcagacaacagacacatgacgatagtacctttctgacaagcctcttcgatgccgaacaaagtctcacccggtacccatccgtcagccacagccttttcgtatgtcttacccggacgttgtcctacaatcacattgaaaccgttatcacgcaagttgcaagcctggcccgggccttgtacgccataaccgattactgcaattgtttcatctttcaaaatctcacgtgctttttccaaaggaaattcttcgcgggtcattacattctcaataacaccgccaaaattcaattgtgccattttttgttttaatttttatttgtggcttacgccaacgttgataaatttatttatttctctgtaaatatcactttagagcgacagaccacttcgctgccattctttttcacctccacatcgtaaacgccctcaccggcatcatccatgaacaaagtcaactcatccccataatagctttcggctacatatgccatttcaaaacgacggatgcgcttctccttatacatctctatcgggaacaaatcaaggatatgctcgatgtaacggatgctgttcacatgcccgttaatgtcaatatcactgtatttggctaccaaagcagcaaccggttcctttgaggccacctttatccgcgaaggtttttctatcggacaaggctcatcacaaacataatctacaatgctgccactatgaagagccagcaaatctgccggcttacgggtattcatgctaatcatcgcccaaacggaacgtgcatacccaatcttcttaccctccttatcgatgatagcgaaattacggtctgtaaaaaggcgatagacattctccacccaagtctgaatggagaaatcttcgtactgataaggcatttcatccagttcgacagccagacgggacaatacccaagtataattgtcctcgtttagagtcgcgatgccaaaaccgcggtcgctggcatggaaacccgcacaattcaacaaatggttgcccaatactcccattgtcagccgtccggtaaagtcgacatgaaacggttcggcaacaaacttgtaggtacctatcttattgttctcgctcatcatgattcctggtgtttactttgacgatattttgcttcacggtccgccagatattcattgacacgctcaaagcagctggtcgtaatggctacgcgacccgaacggacgaactgaagtacgcaatccaactggcgcaactcctcataaagattggttatttcctcactcatgccattcttctcaacaatggcaaatacagcattcacctccacaatacgggcattgtacttacggattactttggacacctccggtttttcttccagcgtaggggtcgttattttatagagagcaatctcgtgctgatagatttcatcatccgtaaaataatgggcttgcagcacatctattttcttggtaatctgcttggtcaccttttcaatggtatccttgtccgtccaagcggtaatggtatatttatgtacccccttgatggaggaggccgatacatttaaactttcgatgtttatctgccgacgggtaaacacagccgtcacttgattcagcaaaccggcaaagttttccgaatgaacaatgattgtatatagttttttatccatagatagagtaaattctttaatttcgcatgacttcagcattccaacaacatctgattgaccgaaccgcccggaggtgtcatcggcattacatttccttcttcctccacacaagcttcgagcaggaacggtccgtcggttgctatcatctcgtcaatcgcttttgccagctcctcgcgggtcattaccctgcgtgcaggaatatcatatgccgaagcaatcttcatataatccggattcatcatcggagtaaacgaataacgacgattgaaaaacatcgcctgccattgacgaacattgcccaagaagttattgttcaacagaatcatcttcaccggagccttttgttccatgatggtacccagttcctgcaggttcatctgcaagccgccgtctcccatgaatacgcataccgtgcggtccggacgtccaaaagtggcaccgatagctgccggaaggccgaagcccatagtacccaggccaccggaagtaacaatgctacgttccttgctgtatttgaaataacgggcggacatcatctgattctggccgacatcagtcaccaatatcgccccgttatgggtagcctcactcacagcacgcaccacctcacccatgcttagcgcttttcctgccggatgtaattccggacggattaccttttcctcttccacttcctcgtattgccggaaactgtcaatccattcctgatggttggcgggttccagcaattgggtaacggcagccagtgtctctttgcaatctcccaggacagcaacatcggtctttacattcttatctatttcggcagggtcaatatcaaagtggataatcttcgcctgcttggcatatgtttccaatttacccgtcacacggtcatcaaagcgcatgcctacggcgataaggacatcacatttattggtattgatattgggccccaggttaccgtgcataccaagcattcctttgttcaacggatggttcgtaggtaatgcggaaagtcccaataaagtgcatccggcaggcattccggctttctcaatgaaagcacgaagctcttgctgggcttctcccagctccacgccttgtcctaccagcaccaaaggccgttccgcaccatttattaattcagcagcctgccgtatggcctccggctccatttcgggaacgggaagatagctacggacatagtccaccttagtaggcgcatattctgttttctccacttgggcgtttttagcaaaatccagcacgaccggtcccggacgtccgctctttgccacatagaaagcacgtgccactgcccaggccacatcttctgcacgacgaatctggtaactccatttcgtgataggctgagtaatgcctaccaagtccacttcttgaaatgcatccgtacccaagaagttcgtccctacctggccggcaatgacaacgataggcgtactgtcaatcatggcatctgcaatgcccgtgatagtattggtagcacccggtccactggtaaccagacaaacgccaacctcgcctgatacacgtgcaaagccttgtgccgcatgggttgctccttgttcatgacgaaccaagatgtggttcaattccttccgatggtcgtataaggcatcgaataccggcatgatgctccctcccggataaccgaaaatagtctttactccctgatgctccagagagcgcatcaatgcttctgcgcctgttattagagcctcaccccgaccctctccttgggagagggaggaaaagttactctttttattattatcagccatactttatctattcattatatttaaaagctcaatagtagcttgaaaaatttgtttcattctctcctcccctcgctttcggaaaggggggcttttaatcaatcagcctcacagcccctttgtcagcggaactcaccatactggcatatgctttcaatgctttggagacttcacggttgcgggttaccggagtcatagggcgtgctgcaagctcttcatccgtcaacttcacattgatagaacggttcggtatatcaatttcgataatgtccccatccttaatcttgccgatattaccaccggcagccgcttcgggagaaacatgtccgatacttagtccggaagtaccaccactgaaacgcccgtcggtaatcaatgcacactccttacccagatggcgggatttgatataagaagtaggataaagcatctcttgcatacccggtccacctttcggcccttcgtgagtgatgacgacgacgtctccactgaccacctttccacccagaataccgtcacaagccgcatcttgtgagtcgaagactttcgccggccccgtaaatttccagatactctcgtctacaccggcagtcttgacaacgcaaccgtcctgagctatatttcccttcaaaaccgccagaccgccatccttgctgtatgcatgttccaaatcacggatacaaccggtcgcacggtccgtatcgagttccttataagacgcattttgtgagccgagtaccagattgaactttccggctgccgcactggagtatttcttgattgcctctttacatacattagagctggtaatactataccggtcgattgcctctgccaacgtcattccatccacacggcggacattcgtatcgaccaatccgcccttggctagctcatccatgatggcaatgatgccaccggcacggttaacgtcttgtacatgatacttttgggtattgggagccaccttgcataagcagggggtcttgcgggagagcatgtcaatgtcatccatcttaaaatccgctccggcttcgtgagccacagccaacaaatggagtactgtattagtagaaccgcccatcgcaatatccagcgtcatggcattcaaaaatgcctcgcgggtagcaatactgtgcgggagtacactctcatccccttcttcataatatctaaaggcattctctacaatcaacctggctgcatcctcaaacagtttcttgcgattttcgtgagtggctacaatcgtgccgttaccgggcagtgccaatccaatcgcttcattcaagcaattcatggaattagcggtaaacatgcctgagcagcatccgcaagtgggacaggcatgttgctcaatctgtgccacctctttatcgcccacactgtcatcagcagatttaatcatggcatcaatcaaatccaaatgctgtccgttccattccccggcttccatcggcccgcctgaaacaaacacagtcggtatattcagcctcatagccgccatcagcattcccggagtaatcttgtcacagttactgatgcaaaccatagcatccgccttatgggcatttaccatatactccacactatcggcaatgatatctcttgaaggcagggaataaagcataccgtcgtgtcccatagcgataccgtcgtcaatggcaatcgtattgaactccgcagcaaaacaccccaacttttcaatctcttcctttacaaactggcctatttcgtgcaggtgtacatgcccggggacgaattgtgtaaatgaattgactatagcgataatgggcttacccatctgttccttcttcataccattcgccgtccacaatgcacgggctcccgccatgcggcgaccttgtgtgctgaacgagctgcgtaactgatgcttcattttcaaatctccttttaatgaaaaagcctctcccactatagtgagaaaggcttaataaattatcttctaacatacgaatacatacataacctttctcacgctcttgatgccaccaccacgacgcgaataatatgcaggaatgccaggttaatagatgtatgtaaattcataacttaattcttcttttttgtttcaaatgtgctgcaaaggtaagggcttttttataatctccaaacaaattgaataaaaaaataagataaatatgaataatcgtaagaaaatatcgccctaaaatcctattttatcacttaacagttctaaatagaaccattcggacagccaatgtaaatgtattgccaatcattgaaaccatttaataatctgaaaattaccaaaggctctctacatcccgaaacaaataattcgtatctttgtctcttcaaatactcaaaaaaagtatttactaattaaataaagatagaaaattaatggaaacagtagaaaacaagtacatcaccgtagcatataagctgtactcaatcgaaaacggagaaaaagatttcgaagaagaagcacccgtagagcatccttttcagtttatctcagggctgggaatgacactcgaaccctttgaagcccagataaaagacttgcagataggcgataaattcgactttaccattccggcatcagaagcttatggtgaatatgacgacgaccatgttattgacctccccaaagaaatctttatgatagaagggaaattcgacagcgatcgtgtagtagaaggtgccgttatccccttgatgacttctgaaggtcaacgcatcaacggaagtgtggtagaagtgaaggaagatatcgtcgtaatggatatgaaccatccgctcgcaggttgtgacttgaacttcactggagaagtagtggaaagccgcctggctacaaacgaagaacttgccgaagtcgcccgtatgatgggtggcggttgcggcagctgcggttgtggtgactgtggcgacggatgcggcgaccatgaatgtggaggcggatgctgccactaaagaattaaaaattaaagaattagaaattaaggaaccaagctacactgtattaagcatgccgcatggtaattctttaatttttaattctttaatttctatattatttacttgtcattatttccaataccaacttatccgtttcattcattcctttggaacctatttttgtcagattgcggatactctgatccacatcctcatcaataataccttctacggaagttacacaacggttttccatggccatgatggctgaaagcactgcggttgaaactccggtagttactttcaaggcacaactgggtttggcaccatcacaaatcattccggtaagattggcaatcatgttctgcacagcatatgccacttgttcataagttcctcccattagccaggttataccgcaactggaacccgtggcagcaaccacacaaccgcataaggcggataaccgtcccaaactctgcttgatatagattactgtcaaatggctcaacatcaaggcacgtatcaattcttcttctgatttcccgttttcttcggcatagactagtacgggaagggtagcggatatcccttgattaccactgccggaattactcatcactggaatcatagctcctgccatacgggcatcacatgctcccgaagtgtaagaaaggatatgagagaagacactgtcgcccataatccggtgttcgtaagtgccacgtaggattttacccagaccatgaccgtattcaccttcgaaggaacgttcagcggcagtcttgttcagtcgtgccgtatcaagaataaaacggatgtcgtctaatggggttgtcatggcgaagtcatacactttgcgtaaagtcaagtccaatacatcctcctcctcttcgaagcaagaagcggtttgtttgtccagcaggatgtccccgttgtgcgttatataagtaaagcaagtatgtccaccagcaataatggcggttgccttgtccgtatcggcttcacagcagacttctatataaagtttctcttctatatcgtcttttaaggatatatggatacgcttttcttctatgaaacgctttcctgcctccactgcatcaggggtactgtctttcaaaacctccaattgatatgccgacttgcctattaaagcgccaagtgccacagcaatcggtaatccaatcatccccgtaccaggaatacccactcccattgcattcttcagaatattggcactcagcaatacggttatcttttcgggacgcttattcaacacttccacagcctttgctacacacaatgctacagctataggttctgtacaaccaatggcagggacgacctcgttcttgacaagggtaatgatttgcagtctttccgtttcagtcatatttattcaaatttgatgcaggcaaagataatgtattttattctataataaaacgaacaaaaaaataaaaaagaggattccaagcacagaaccctctttatagataaagaaaaatcttttcttattttttataagaattgtcaccaagacttatacctaaattgaatctggtagtaacattccaaattccttctatttcagtcattgagttcaaggcagtcagcatctggatcatattccacaaaggtatactctgtccccagaattcaatgttcgtgttctttaacaacatatctacatcaggtaacatcggatagagagcaggcataaaaatatcaaataaatccttatccagatagatagagagatcatttaccgttcttacgagctcttcctcgttctttatctccaattgggtagttctatagttcaaggggaaaccatcgattacatagccaatcagtttttcaatatcactatcggaaattttagaaatatctaactttttcagcatattatcatcttcaagtccagccaacaactgacccaacaaattcttgatgtcagctccactcatgctcttcaccatttctataatctgcaaaatagcttccggagtcacttgagaatcctcagcatctttcaatgcttcggttacaatggcaggaatattcagcacaacatagatatgctcacccttcacataccaataagccagatttgcaggagaagatttccaaacaatgccgtccgttgaagggagctgtcccataccggccataatcatctgatccatagtaatgtttatttcttctgcatagctggctacaatagaaccgtcagctttgaactccacatctttcaaaagctgtatcatagccgcagataggacatttgtccctactgtcgagatattatccgctgcaatccctgcattaccaccttctccataaggcgatacccaagtcaatcttcccggagcataaatattggttctatctttagaatcagcataataaacagcatcacacaactgatatttcttcacgatatctcctacaaactccgtagaaaccgtaactgcagctttcccttctaatgtgatagtacccgaaactttcacattcgtagagctaagcagcacccaagccgccttagtagcaggcgttacacttttctcgccttgaaacttaaaagtaccgtctgtctgttcaacaacagtcacattaatttctatttcatctgcacctctaaccactttattcaacgtcaaaataccattctgcgcatcggtcatcgctaatttcatactagcatcagaacttgttggaatattagtttccagttccagattttcagctgtaataatctgattaggcactttcttccaattttcatcgtcatcatcactacaagccgtgaataaactcattgaacagatcaatgcaaataaataaaataaattctttttcatacttttttgagtacttgtttagttaataaaaagcttcccaagggagctattaatttcccattttaaattaaaggtgcaaagtaacactttttaaggttacagtacaaggtcttttctaaaaaatagatgttccttttttcatcattacgagtgaaattccgatgtatatttcataaagagtaagccatttttataaagaacaaaccattagccaaactctggtaaaggcaggcaactttatacggaaaggattttttatcttatttccttaaacgttttatgaaaaaagttgttatctttataaagtcaaaagcatttcctataaagcgtattggcacattaacctcatatataaacctttaaagcatttgatatgttcaactcatttggaaatattctccgtcttaccagttttggggaatcacacggtaagggtgtgggaggagtgatagacggattccctgcaggaatagccattgatatggatttcgtccaggcagagctcgaccgacgccgccccggacagtcacgtatcactactgctcggaaagagggtgacaaagtggagttcctctccggcatcttcgaaggaaaatccacaggctgccccataggattcattgtatggaaccaaaaccagcattctgacgattacaataatctgaaagaagtctaccgaccgtcacatgccgactatacttataaagtgaaatatggcatccgcgaccaccgcggaggcggacgttcatcagcccgtgaaacaatctcgcgtgtagtagcgggtgcactggccaaattggcgctgaagcagctgggtatacacatcacggcgtacacttcacaagtaggtcctatccgccttgaagaaaattataccgcatacgacctcgacctgatagagaccaatccggtccgctgccccgacccggcgaaggcaaaagaaatggaagaactcatcttcaagataaagggagaaggagataccatcggaggagtggtgacttgtgtcgtcaaaggatgccccatcggactgggacaacccgtattcggcaagctccatgcagcacttggagcagccatgctcagcatcaatgcagcaaaagcattcgagtatggagacggtttcaagggattaaagcagaaaggctcggagcagaatgatgtgttctacaacaataacggacgtatcgagacccgcaccaatcattcgggcggtatacaaggtggaatcagtaacgggcaagacatctatttccgtgtagccttcaaacccgtggcaaccgtactgatggagcaacacaccgtgaacattgacggtgtagacaccaccctgaaagcccgaggacgccatgacccgtgtgtattgccacgcgcagtacccatcgtggaagcaatgacagcaatgacattgttggattattacctgattgacagaacaacacaactataatattcacccatggaaataaagaaatacatcaccgagaacgagcctaaaatgctggaagacttgttcagcctcattcgcattccaagcatcagtgccaaacccgagcatcacgacgatatgcttgcctgcgccgaacgctgggcacagttgctgctcgaagccggagcggatgaagccctcgtaatgccctccaaaggcaacccgattgtttttggacagaaaatcgtagacccggacgccaagaccgtattggtatatgcccactacgacgtgatgccagccgaacctctcgaactttggaaaagcgccccctttgaaccggaaatacgcgacgaacatatctgggcacgtggtgctgatgatgacaaagggcaatctttcatacaagtgaaagcgtttgaatacctcgtacgcaacgaactgctgcaaaccaacgtaaaattcatcttcgaaggagaagaagaaatcggttcgcccagcttagaaagcttctgccaggagcacaaagagttgctgaaagcagacgtcattctggtttcggacaccagcatgcttggtgcagacctgccttcactgaccaccggactgcgcggactggcctattgggaaatagaagtgaccggccccaaccgcgacctacacagcggtcacttcggcggtgctgttgccaaccccatcaatgtactttgccagataatcagccaagtgacggacgcagagggacgtatcaccgtaccgggcttctatgacgatgtggaagaagttccccaaaccgagcgcgacatgatagcccgcattcctttcgacgaagagaaatacaaaaaggctatccatgtaaaagcacttttcggagagaaaggttacagtacgctggaacgtaacagttgccgtccgtctttcgacgtatgcggcatctggggcggatatacgggtgaagggtccaagaccgtgctcccatccaaggcatacgccaaggtatcctgccggttggttccccaccaggaccaccacaagatatcccggctctttgccgactacattctggacatagcgccggattcagtacaggtaaaagtcactccgatgcatggaggccaaggatatgtatgtcccatcaccctacccgcctaccaagccgccgaaaaaggttttgaaaaagcttttggaaagaaaccgctggcagtgcgtcggggtggaagtatccccatcatctccactttcgagcaagtactgggcatcaaaaccgttctgatgggcttcgggctcgaatccaacgccatccactcacctaatgagaatataccgttggacatcttccgtaaaggaatagaagctgttgtcgaattctacctcaattataaataaaacaagaaaatcaggatgaaagacttccaaattcaagccatcggcctcatgtccggcacttcccttgacgggctggacgtatgttgttgcactttccggcagcaagccggaaaatggtctttccacatagactgtgcaaaaggctatagctaccccgacgccatgaagcagatattgggtaccggtgcacagacaatgagtgctttggagttcatcactttccacagctcctatggaaagtttctcggtgaacgtgtcaacgagttcatgcaagaatttggagtccaccccgatattatcgcctcccacgggcataccatcttccatgagcctcaaaagagaatcatgtaccaaataggtgacggagccgccattgccgctgaaacccgtatacctaccgtttcggatttccggcggctggacatcatgctgggtgggcagggcgctccactcgtacctattggcgaccggttgctttttgccgactacgacttctgtttgaatatcggcggtttctccaacatctcattcgagcaggacgggcggcgcatcgcttttgacatcagtccggtgaattacgtcatcaaccattactgccggcaaataggattggaatttgaccgtgacggcgagatagcacggcaaggcaacatctgccaagaactgctggacgaactgaacggaatggatttctaccatcagtccggaccgaagtcattgggacgggagtgggtggaaacgctggtatatcccatgctcgagcgttatggcttgagtatggagaatatgctacgtaccttttacgagcatgccgcctggcaaatatcacgcatcatcaccgcccgccccttgcccgatggtaacggaaaactgctgattaccggcggaggtgcattcaacaagttcctcatagaacgtatcgacgccttgtgtccgtgtgaaatcgtgattcccagccggcaaatcatagaatacaaggaagccctaatctttgctttcctgggtgccctctatatggcggacacacccggatgcctcgcctcggtgacgggagccacgacagataatatcggagggatgctgtttaaaatatagtcaattttaccattatggaaaaatcaaaagacacctggaccgtcttatccagcgaataccttcatcgggctccgtggctcactgtgcgtaaggaccatgtagtgctgcccaacggcaaccacatcccctcctattatatattggaatatccaaactgggtgaataccatcgccatcacccgtaatggacaatttgtctttatccgccaataccggcatggcatacaagaaacgtcctatgagctctgtgcaggggtatgcgaagaagaggacggctctccgatggtttccgcacaacgggaacttttggaagaaaccggctatggaaacggagtatggaaagagttcatgcaaatctctcccaatccaagtacccacaccaacattacctactgtttcctggctacggacgtggagaaaatctccgagcaacacttggaagatacggagaacctgaccgtacacctgctttccttgcaggaggtcaaggacttgctgcaacaaggaagcatccgccaggcgctgatggctgctcccctctggaaatacatggcggagagaattatttaatgtgattacccttattcaaacggcttgcggaatgtacatccggatttccattcggaacaaccgtaagccgttttccccttgataacggtaccttttccgcaaagcggacaaggctggccgacgaagtcatcagcttgtacggaagcctccgtacttgaagctgccacagcgcccgaagcctgctccgtctttttacctgcggcggcagactttctcggtgttcttttcttcggctcctttttcggcttatcggcagcctctgtcttggcagaaaccttactgcccttttcgggagcaggcgcttggatggtgatgtggcggttgctgttatcagaaagtacactcatcacgacttccgataccatctgcttcaattcttccaagaattgtccggcattatatgtccgcctttctatctcacgtagctttttctcccagataccggtcagttccgccgacttcaacagctcctcatggataatctgtatcagctccacaccggtaggggtggctatcaggttcttcttttccttgcggatatagtttcgcttgaacagcgtctcgatgatggctgcacgggtagatggacgaccgataccgttttccttcagcgcatcacgcagttcgtcgttatccaccagcttgcccgccgtttccatagcacgcagcagggtggcttccgtataaggccggggcggctgcgtccacttctcatacaaatcggggacgtgcggtccgctttctcctttcacaaaagccggaagcacattctcctcttctcccttctcctctttctcctcctgcgattgtgccgaggggatgccgaagataatacgccaacccggttccagaatctgcttgccggtagccttgaactctatgctctctacctcgcccaatacggtggtagtggcaaacttacaatcgggatagaatacagcaatgaaacggcgtgctatcaaatcgaatacgcgacgctccatatccgtcagattctgcggatgctgaccggtaggaataatggcgtggtggtctgttaccttcgagttatcgaaaacctttttggacttcaacaatgcagttcctgtcaaaggggctgtaaatgtctcgtaatcacgcagacctttcaagatgccggggcatttgggatagatgtcatcactcaaataggtagtgtctacacgtggataggtagccactttcttctcatacaaagactggatgattttcagcgtctcatcagcggaataggcaaacttcttgttacattccacttgcaaagaagtcaagtcaaacaagcggagtggcgcctccctcccctctttcttggtgacatccgtcacggtaaaaagagaattcttaatctggtccaataaaacaagcccacgttcgcggtcggtaatggggtcgataccccgattctcttcttcttttttaggtttcttcccggcagctatagcctctttctgcttctcggcttccaataccagttcctcctcacttttccggaggatggtggagaaagtggtatctcgatagacggtcttcagctcccagtattgcttgggaacaaaattctgtatttccaactgacggtttacaatcagcgccagtgtcggcgtttgcacacggccgatagaaagtacctgccggttctgcccatacttcatggtgtagaggcgggtggcattcatcccgagcagccagtcgccaatggcacgcgacaagcctgcttcgtacaaaggctggaaatccgacgcatcgcgcagcttggcaaagccctcacggatggcttcctctgtcaatgaagatatccaaagacgtttcaccgggcaacgtgccccggctttctgcatcacccagcgctgtatcaattctccttcctgcccggcatcaccgcagtttataatcatatcggcatgttgcatgaggttctctatcgtatggaactggcgctcgtatgtgggattgctaatcagcttaatgccgaaacggggaggtatcatggggaggcttcccaaactccatgacttccagttaggggtatattcatgcggctccttcagcgtacaaagatggccgaatgtccaggtcacctggtatccgtttccttcgatgtatccgtccttcttttctttcgctcccaatacatcggctatgtcacgcgccacagagggcttttcggcaatacaaactatcattcgttattcttttagcgggacaaaggtaataaaaagggggcaagaacgaaactataagcaagaaacgataacatagaccaggtgatttttctcccccaaagctgacgtacggacataaaaaaaggagtaccgctgtactccaacctttgttaaccttaaatctaatactatgaaaaacacattgcaaagatacggacttctgataaatctgcaaattatccaactaaaaaagtatgttctataacacagattaagaaaaagggacggatatgtaaacacataccgtccctcttttaacatttaacgtgtcggattattcttcatccaacaagatttccaatatctggcaagcagccttggcaaccggagtaccggggccaaagatggcagctacacctgccttgtaaaggaagtcatagtcttgtgcgggaattacaccaccggcaatcactacgatatcctcgcgtcccaacttcttgagctcttcgataatctgcggaaccaatgtcttgtgtccggcagccaatgaagaaacccctactacatgaacgtcgttctcaaccgcttcacgggcagcctcggccggtgtctggaacaagggtcccatatccacatcgaagccacagtcggcatatccggttgcaacaaccttggcaccgcggtcgtgaccgtcctggcccatcttggctaccatgatacgaggctgacgtccctctttcttcgcaaacttctccgccaattcacaagcacggtggaagtcgctgtcattcttactttctgatgaatacacgcctgatatagttctaattactgctttataacgtcctacaatcttttcgcaagcataagagatttcccccaaagtggcacggacacgggctgcctcgactgccagttccagcaagtttcccttaccggtctttacacattcagtaatagcctccaatgccttgtccacttccgcctggttacgtccttccttcagacgcttcaggttctcaatctgttcctgacggacagccgtattgtcgatttcaagaatatcaatcggagcttctttctccagacgatacttgttcacaccgacaatggtctgcgaaccgctatcgatacgggcttgtgtacgcgcagcagcctcttcgatacgcatcttggggataccggtttcgatggcttttgccataccgcccagcttctctacttcctgaatcaattcccaagccttgtgagccaactcattagtcaaactttccacataataagagccaccccatgggtctacattcttgcaaatgtaagtttcttcctgaatataaatctgcgtattacgtgcaatacgtgcagagaaatccgtcggcaaggcaatagcctcgtcaagagcattggtatgcagtgactgggtatgtcccaatgcagcagccatcgcctcgatacaagtgcggcccacattgttgaacgggtcttgctctgtcagcgaccagccggaagtctgggagtgcgtacgcaaagccagcgacttcggattcttcgggttgaactgcttcacaatctttgcccacaacatacgtgcggcacgcattttggcaatttccataaagtggttcgttccgatggcccagaagaaagagagacgcggtgcgaaagcatcgatgtcaatacccgcagccgttccggcacgcagatattccaaaccgtctgccagggtgtaagccaactcgatgtctgccgtagcacccgcttcctgcatgtggtagccggagatggagatagagttgaacttaggcattttctgggaagtatattcaaagatgtcagagataatcttcatagagaatgcaggcgggtagatataggtattacgcaccatgaattccttcaagatatcgttctggatagtaccagccatttcttccaacttggcaccctgctccagacctgcgttgatgtagaatgccataacaggaagtacggcaccgttcatagtcatagagacggacatcttgttcaaaggaattccatcgaacaacaccttcatattctccaaagaacagatagacacacctgccttacctacgtcacccactacacgttcgtggtcggggtcgtagccgcggtgagtggccaagtcgaaagctacggacaaacctttctgtccggaagccaaattacgacggtaaaaggcatttgattcttccgctgtggaaaagcctgcatactggcggatggtccaaggacgcaacgtatacatcaccgagtacggaccacgcagataaggaggaagcccggcagcatagcccaagtgttccattccctcaaggtcttcttttgtataaacaggcttcacctcaatgcgttccggcgttttccaatcagcatggatgccgttagccttttgccactcagcaccgttgacgggctgaaaagcggcatatatatctaagtttttaaaatcttttcgcatcatgttatttacgatttgacgatttacgattgaagttgcttacttcaaaagtttggcgttgaattcttttaatgtctctaatacgttgacacggacatggataaagttctcgataccggcagccttcaagtcgtccatgcaagcaggagcaccggctacgataaacatggcacggccattcagagccttgaaggcaggaacagcatattctgcatattcatcatcacttgaacacaataccacgatgtcggccttggcagccatagctgcttctataccttcttctacggtggggaaaccgaggttatccacaacttcgtatccggcacaagccagaaagttgcaagagtactgtgcacgtgcctggcgcatggccagattaccgatagtcagcataaacgctttcgggcgtttgccggaagcctctgtttcgagacgcaacgcttcaaattcactggcagcacggtcaaagttcagtgtcggaacatctttttcgcaggtatgtccgccgccgcaacagcaagtagcctcaaccggtttcttatctcccgccttttcattaaagttggggaactggttggtacccagcaacacttccttacgcttggcgactgcagcatgacgggccttgttgctttcgtttacggcagcctgcacttttccggctttcacggaagcatagaaaccaccgtcttcttctacagtgaggaagaggtcccaagcctgcttggcaatagagacggtcaaattctcaatatagtaagaacctgcagccgggtcaataactttatcgaagtgcgattcttctttcaacagcagttgttggttacgcgccatacgctcagagaattcgttaggagcatcataagtcttgtcgaacggagtaaccgtcattgagtcaacgccggcaagggcggcactcatcacctcagtctgcgtacgcaacaagtttacgtgtgcatcaaacaaagtcaagttgaatgaagaagtttccgcatgaatcttcatcttggctgcacagcggcattcgttatccttacccttgttgtcgcagtcgcgcagacactcgggactgtaagaagccacaatattagcccacagcatacgtgcagcgcggaatttggctatttcaaggaagtagttggaactgataccgaaattgaacttaatcttcttggctaccattgcagccggcagaccggcatcaaccagctgattcatatattcattaccccaagccaaagcataacccagttcctggaaaatataagaacccgcattgtttaatgtcaacgcgttcacattcaatacacggtatttcggaagggaagcggtagcctcgagcagcgccttggctgttgccaccatatcacctttttctttacctttggccagcattttgttgaagtagtcatagttgatggagccctgcaatttcgtcaagtcataatccttcttctggaaataagcgacaagaagttctgcaagttccaccacatgcccctggcaggtagagaaattcaactcgacacattccgcgcagatatctttcaacaaagtttcaatatactctgcgttcaattccttagcctttacatggaaagagagtgaatctacacctttattcaagatatccaacgccttggcattggcctctttggggcattccactttgatttcctgacgaacaagccattcattgttgtctttcttggtacctctgagataaggaaactcgccgggaagagcatctgttgtcttcaaaccttccaagtcctccatacggtagaaaggtttcaccttaaatccttcgtttgtcctccaaacgagcttcttctcgaaatccgcccctttcaggtctgcggtaactttctccatccactgctcagtggaaacgggagaaaagtcggagaagagtttttctttactgtctgccatagtttatttaaaatttaaatagatgaatactattcatttttgtcatcaagagacttgcaaatataaggaaatacttagaacaaaatctttttttagtaaaaaaatcgcagaatttgcaattatcttagaattaaacggttattcgggttgcatggaaattgggtaacgagatggcaaccgttcctatttcagagttcattattgtcttgcaccaatgttataactcttgatgtacaaaggtataacttttttatgaatgggcaaaaaggtggtgaagatttcattgtataggtgcaattatttgaatttagtctatcatcaatctgtgatattatgagttccccgattccgccaatcacccatttccgttgctcgtctgcaaaggaagtacagacttcatttgaaagttgaaaggtcgggcggcaagccgtttcggggtgaatcttccttccttgaagagtattcaccccgaaaacctttcccctttcaagcctgtacttaaaaccgcagacggcaacggaaatgagcgactgacgaaaatgtagataaacaaacagacagcatacaaaagggttcttacattgataacccatttgtatgctgttcttgtatctatccataggggcactattattttgcatcagatgaaaatatgggcaagcggtaaatttcgctccctccaaaaatatagaagggattatccgctgccactcatcaggtgcgtgccgttatactcccgtttcaaggcttgctcaatttcactacgcttgtagaggactttgccaccaagcacataataagggagtgtcccgttactgcgatactcgctcaatgttcttcggctgactttaagcatatatgctacctccttgtcgcacatatattcatcgtcattgggtaatgttgccccatcttttggaatgctgtcaatgatttccgacaactggtcgatactctcgtgaatggactgcatccacgcatcgtctttggttctcatctcttggtacatagttcaaattgtttttagtgttatacatcggttaaatctctctgcctcgccatttggcctccttgcgtctatcctccaccttttttacgatgctatccacatcttcaggcaggtagtaggtgcgattaccgattttggtgtaggcaagagttccgttatctcgcaaggtctgcaatgttcgcttgctgattttcaacttctgacaaacatcctgatggtcgagccaattgtttgtcttttttctaccaccctttacaacgggtgagttcgatactcgcagaatgaactgctcaatcttcgtggcaaattcctcgaatgccttacgctcaaaaacgattaaatccatacgctttcgttttatttgtttttaatattctcaaccttttgttccgctaagatatagtcggcataaactccaatccaagcgttttgaagatgtggcagtgtgtggcgctcatttggcactctctggcgtcattctccactacgcccacatcggtaatttgttctattcccattagccgttgccgtatcttcactgcaaataaaagcagtaaaaagcatattgcaatgggggtgtctatacgtgtcatagactgacatatcattgcatattcggtgttatgaatagcaccactaaatcctattatatccttaatcattgttgtttctcttttcatcgtcatttcgttttcttggtgcaaagaaatagatatgtaatcacacctcaatcatcttgtgagcctgttgcagtatatggcacaggtcgtggcacttttaggtgtatatgatgatacctttctaagcatacatcacattgtagtccatattatataagaatacacaaagcgaccgcccgtctcggatcttgtccgtagcattgccgtttgtcagaccgatacctatccgtctgccaaacttttgccccgaacagccgatacaggcggtcacttattctatgaaagcagaatgacagatagaccgacctccgatgtttcggaagtccgtctatataccattgaatttaagaccttaattctcccatttaaggttttcggcattactcgctcatcatcgttcaacttgggaagaatcatgaagtcggaacgcctacccaatcagcctgaaaagcaatacaattcataattgcctacatagacctaattagttgtggtagaatagtatgcatattttctttgcagcagataatcggtcataattgtgcacaaagaccatatgttgaactttcaaaaccattcaaaaaatgagtaaaaaagagattaaaatcagtaacgaagagatgatggagttgatgggactgaagcgtacatcagactctaatgacgattctgacaagaccgccattgagttggctaccgagaagtattcaaaggaggagttggcagcaaaggaaactgtactatcagtcgagccaaagcctgatgagattactccagaggatacggaggagttgacaaaggttgctaactctgaggagcagtcaccagcccccaccattcaacgtagggtgagcagcaagcaacgcaaactctcattggaggagtaccgcaatacttttatgcgaccttacaggattgaagaccgcaagcccgtattcattagcggcaaattacgcaagatgctcgataagttcgcctgcaaaatcggtgaggacagaatgagtatgtcgggattgttggagaatatcgttcgccatcacatcgaactatatgccgatgattttgagcattggaaagggatgtaatatcacggcagcttggactgctaaataacagtctacaccatctaaaaccgtcaatgacggtggaagcagcaagccctcggtcttggggtgtagcgaggttatctttcgggatgccgaaaatgtcggatgagccgccattgcacccgaaaacctcgctccaccccgacgggtggaggtaatccgctcccgatggtcgcagattgtgaaaagccgaatttgaaaaacaaatgaaatgtaaaaagtatggtaaagaataagacaaaacccaagcccagaggccgaccacaggtcagcactctgaaacgacttaccaagtcggtaacggtgaagttctcaaagcccgattatgagatgttacgccgccgaagcaagaacgccaatcgcacgcttgccgagtacatacgagagtcagcctttgatgcacaaatcgtagccaaacattcggctgaggatgctgctgtaatccgtaaccttacgggtatggcaaacaatctcaatcagcttacaaagctgtcgcatcaaacaggcttctatcgcacgaagaatatagtggtggagctactcgaaaaactcaagtctataatgaacgactataagtcagcagaaaggaggtgccgatgataggtaaaatcaagaagggcaaatcctttggcggatgcgtacgctatgtgatgggtaaagacgatgccaaaatccttgcctcggatggtgttttgctcggaacgaacaaagaaatgattgatagtttcaactgtcaatgtctcttaaatccgaaaattaagcaaccattagggcatattgcactgagttttaagcctgaagatgcaccacgattaacagatgagtttatggcaaaaattgctttagagttggaaaatccagtgtaagctgccccctaaaaccaggcgattctgcccccttaaaacattcaacaatgcccccttaaaaagtcttgaccgatggggttattattattttagtttatttccctctgtatgcagccattttacggacactttctcctgtcagctcaatccggtgcgccgtatgtataatacgatccataatggcatctgctactgtagggtctccgattgcatcataccaattgtccgttggcagttgcgaggtgatgatgatggacttgcgcccatgtcggtcctctattatatcgagcaggatgggtcgttccttggcatcaaggttcacaaggaagaggtcatccaatatgagcagcgtgctccgttcgattctcttgagttccgattccagtgtgccttttacttttgccaccttaagcgtacccataagtttcggagcattcgcataatatgtccgtatgcccttcttgcaggcttcataccccattgctgtggcaaggaagctcttcccggtaccggatgaccctgtgatgaagaggttctgtcccttgcggatgaactccagcgatgcaagccgctccatctgattgcggtcaaggccacgcgggattgcatagtctatctgctcgaggcaggccttgtagcggaacgccgccccgcgtataaggcgttggatggctgcattggcacggtagtcccattccctggcaagtaacatgtgcaggaaagattcgattgtcattgtttctgccatagtggaggttaggctttcagtgaaggcggcggccatgccgtgcagcttcatacggttcatcagttcgattgtcaacgtgttgcggtctttttcgacagctatcggtgcggtaagattatttgtttccattgttgtctctatttaaatgttttaattgtgcgaagtaggctgctccgcggatgtttttgtggatagatgttacggggacctcatcgtcaatgtcgtcttttgacaggaagtctgcatcatccccgcgttcaaggatccgccttatctcctgatatccgtataggcgcagttgcgtggcgcatgcgcttgccgccaccaaccgttccagcccgaaggtcttctccaacgccatgatgcctctgcatgaacggaacgccgcgggaggatacttcttgagttccgccaccttgcgcagatacagcagcaggacgttatctgtctggccggctcgttcgtaaatctgttccagatccttttcataacttccatgacgtccgggcagtccgtgggcatccttggtcgtataggagtatggcgtgtcatcgcgctggtgtgtggtcaccagacgcaggccatgatatatttccagcgtgtccgcatcatagacaatctcgacacgtttgcctatatactctttcggtacgctgtaatggtgaagcctgaaggtgacatagccgttacgcattactgttgcggagcgtcgctctttcatctgatggcgtatggcgggaagcgggcggaggcagtcggactcaatctgctcgaactgttcccgtctggactggggacgcccgctcatcctgcgtccgttgaaggccgagagcgattcggatatggccgcattcagagactccagcgagtggaatacaagaccctcgatgtcagcgtagacggatcggtaaagtagcttcacggcattctccaccaaggccttgtcctttggatgacgtacccgtgtggggtatacggtacatccgtagtgttcggcaaatgccgcaaactcctcgttgattaccggctcgttacggtcgctgcgggttaccgccgatttgaggttgtctggtacgatcgccatcggaaccccgccgtaaaaatgaagcgcgttctcacacgccttaatcaagtcctgccttgactgggaccagaccgcctcacaataggtatagtggctgcacggaagtatggccacgaacacttcaacgctgcgacattcaccgctttcactgtcaacgacttccagtttgtcaccggcgaagtcgatatacatctggtctccggcataatgctcgacatggcctacgacatgtgtcaccatacggtaacgcatgagatagttgccgaaactggcatgtctgtatccgtcaggatgggtctcgcggtactcttcgtacagggttttcactgttacgcctcggcggctaagccgggcagcatactcaggaaggagtgcctcaagctcaagctggcgttgtgacggttccctgttacggccaacaccttcagagaacatttcctggatgcgagcggaaggcatggcggccaactcctttatcggtataccacactcttgaaacaggcgcacatatctgcgcaccgtgttgcgggaaagctcaaagctcctgcttatctgctttatccccatccccaatgcgtaacattggaggatgtttgctatctttgttgtcatagtagaaatgattttatcccaccggtcaagacgggaatcaaatctacgaaaaatcccctgccgggcattgccaagcaggggtatttttatattggaatcaagggggtaggattattttagcacaagggggcagaatcgcttggttttagggggcagcttacactggattttccatttgagagtagagttagcgaaagatttgccatttaatatgtatcggtatgggacaagcaatcataacaatcagcgaatcgggtaaagtgaatatcccaagcggtaatgtatggatgtcagaaatggaattagtggggttgttcggggtgatagccccgacactccgagccgctgtcagagcgatatacaagagtggaacactatccactgcaacaactcaacgatgcgattttgcaacgccccaaagttgggctacattctataatcttgaagtgattattgcccttgcatttaggctgaacacctacgaggcgagtagaataaggcagaaggttttggagagtttatgccaacgaaaagagaatgggattagtctgcttatatcattgcaaggtataggacagcaaatctctcccaaaatgagttgttgaatttcaatctataaaggcgaagccttgctattctcacgaacggcaaggcttcttagctaatgttttatgtgtatatatctatcaaaggatgatagaatttctttgattacatttacataacggtaattgttgcattagactcgttggtatactgggttgttcctgtaaccgtagtgtttttcaaaatcaaagtagaactagccatattaccacgtaagatgataactgcatcaccatcttcgcaattagatttcaacgtactattagagatattgaaaacgccgttgttagtattaccgttcacaccgatacggactgcataaccctttgtgtcaaaagtacagtcactcatctctaaagcaggtgtattattgaggtttacaccgttcttagaatgaaccttacaatcaactattttcaagcctttttccacgttggtaacttgtaacatagagtgcataccctcgtttgcagtacagccgctgatgttcagattccaatcaccgcctgtgtaggatttaaccgcagcaacatcttctgtagaagtagtggagaaagtacaatcctttacagtaacattgttggtgtaacgagtgttactatcgtcaattttacccaaattgatgtaagcaggttcagaaatattttcagcactgaagcttatattttgaatggtcaaacctgctgtagcatatcttttactcttaccgtcaacaatgattgcaccattataggtcttctgattaccgataattgtaactttaacattttccttctgtactgcagtagcattaccagtaatgttatcaccaaggaaaatagttacatcagcagtagcattagcgatagcctgagtgagttcgtcagcggtagtaactgtcaaataagtaggagcatcagaattattttcagcaaagtcattgttgattacaacattgttgaatataccgcccattacgttgattacacctgctccgtctggagtggttgaacttggcttctgattccaaatagcacctgcatcaccttcacgaccattgaatgtaccaccataaatattgatagtagcaacagtagcatagttattatgaccagcagcattggcaaagttacggaacaaattacgatggaaagtgtaagtgccattgtaaatattcaatgtagcagagtttagattactattgttatcaacgaataaaggacacaatgactcttgagaatattccaatgcagtcatagtccagttaccaccctttaggtttacttctccaccgtcattttcaataaatgcagcgtatgcatttggccatgacttagcagttgtcaccttcacatttccatcaccaacaattgtcaatccactattaggttttacatggaaaatagctgtacttacagaaacatcaggaatattagcaacgataccatatccgttaaggtcaatagtcacatttttattatcaattgtaaataagtgttcgcctgctgtagcaccaagtgtggtttcaccttccaatttgatagtttcaccatcttgaacagctgccatagcttctgcgaatgaagtataaacaacgccattgatagttgcataaggtacgttcacattatggtcatcctcataaacagggtcaatgacaatgttgaatgtaatgtcaccagtaagcaacttaccaaggatatttgtacgccagttacgctgtacaggaacactgttcaaaccctgattgaactcgatgttgctgtaagaattattctttggagcaaatacaaaagcgatgttttccaatgtagccttttcataacctgtctgttctgcagcaggaagaatataactcatagaaagccagttgtattcttcatcttcaccatcgccattagcatccactttcaagattgcggggtcattaggaatagcgttcaaagcataactaacttcagtagaaccgttaaccttaccatcgagcaagttcaaagaagtagcagcgttcttaataacaacagatgaacttccaatctcaatacctgatgcaacagcagctttccaatcttccttagtcacacccacattgatttgagcgaaaggacgcttcatttctacatcaatagaagtagaacctgttacagtaaattctacagtcttgaagaatgcatcacgagtttcatcattgttcactttgttctcatcgttggcatagtttacaacaacactcatcttgtctgtatctactgtataagcctcacaatcaccatcctgtgcccagaatgccactttgtaagtctgacccttagccaaagtaatgctttctgtggttgggaatgttacacctgtttttgttacagcctgaatatttgagagacggttaccatctttgtcaaatacagcataaaccaaaacatcagcactcttaccatcactgatagcacgggtagcgataccaccttcaagacccagtgagaaagacacctgagcctcatttcctgactgaactacatccagttcgtcattcgaacacgatgttgccaacaacataccagctgctgcgaacatacctaagaataatttcttgttcatttctgaaaattttaattgttatacaaatagttttactttaatttcttgttttaaatgttttccgcattcattcggattgccgaaaccattgtcgagggttgttccgcttatgcagaacggggattaatcatcaatctgtcgtatcctgcgagttgcaggatgaaaggtcttggaactgctccatccctttgtggctgttagttggtcttctgtctcttgttcggcttcttaactcgttattcgggttatacatattttgaaattctcttattctgctgtaaatcctcctgctatgttgcttcgttggttagcttcaatctcaacctttggaaactccaccgtcttgctgttttctccatcggtcaatgtcaattccgctgcaatctgtatagccgttgtcggagcaaacagatagcccatagcgagatagttatatgctgtaccatcagccgagaatgtttcagtggtggtgtcgctgaaattccaagtgaaatcggtctctccacttacggtattggtaaaggggtggaatgtgtcaggaactgactttgctgtaaatgatgtctgcatcacttttcccgtagttcctacattgatttgagccaacgggcggacaagttcaatggggtaactgttgctacccgttatggtaatatcttcttcggtcgcaaagaatgcatccgatgcttctgcctcggagaatgttatcggatttggtagagtgttcatcttgatagcggtcagatcatctatatcgtagatgttctgactgctgtcatacgcccaaaagacaaaactgtatgtctgattctgagctaatgagaggcttacatctattgaagtaccgtaaattgcaaattcttttcttccgatttcggtgttccgttcattgaaaattcccacgacaagggtattcacctgctcagctttgccgaaagagcgtgtacgggtatcggtcggtagcattgcggtaaagcttacttccacatcacccgtttcctgtaaatcatcggaacaggactgtatgccaaccaccataagggcaagcatcgctaatatctgtatgttatgcagtagattcttcattgttcttagcagttaggggaaaatcaggttatggtctccgtcaaagtcgggattgatggttacacctcccgatgcttccgacatcaggaacatacccgtcattatggtatggtggcttcgcttcaacggcacttctatcggctcggtcaaggagagttgtgtaccctcattgtcgtaaatgccaatctgcaccgtcactgccgatttcttgccgttcacaaacacataatcaaatcccattgaggcttccgaatcggatagcttcttcaaggtggactcgaacatcactcccgtagatgaatccacgggcttgtcggtgtacatactgtatgcgtgtggcataaatcccacatagtagaatactaccttgtaatcctcgatatttacggctcttgtcggggtgtcatctgccgatgccgacttgttgccgttggctttggaggcgacacggacagattccttgtcgatgaactcttcaacatcattcgtcacgaactcgaacttggcaagaggtcgttgcatcgccacattaagcgtatcaggcagacgctccataatatctgctacgagtgaaatattgttcgtgcctctgaaagcgtcacgatggttggtatttcccttgtggtcgccctgcaacataatctctgcgaagttgtcggcattgtggaaatgggtatcaccgcttgtcttcaccaaatcagaccacaccattacattgtagttgcccggcagtacatcaagcgtcacttcgtggtcgtaaccttcggcaatatcctttgtgaatatgaactcctgtacatagtcctgcatcgtgcgttgtttctccgatacgggataggtacggacgatgtagcgtatcttaccataatcctgatggttgtcgtatgtatcgcccaaacccagttcaatgaccgatgctccatcgtacagatgttcccactcggtcatatccgtttcatagttgaggcgaagatgcatttttacaaactctggtgtctcaggccattcgtgaacatcacaggcagagaacagcaacagaggcatacatataataaggtacagaatctttctcatcgcttgcctcctttcttcttcaagtcaaacgaatatgagaacgataccgcagcttggtctataccccaataggtcttcttgatgctctcaatcatcaaaccgtcctttgtattcggtgtgttgtggaacttgtcataatgacgggaatagacacctgcaccaagagagaactccacccaccaaggtgtgttcctgctgataggcaagcgatagccgacactcacgccaccaccgatagacggtgtttcacggttatggtcttgataacggtaatcaccgtcaaaggcgaaattgtaataagccagtccgaaatgtgctcctgcaaagaagccatcgttgttttccgacagccaatagcggaactcgggctgtacgctgagtgttctgaacttgatggtggtcttgaaatagtcccaagccgaataataaacgggcaaagtgaacgaccagtgctttgccaagtcgatttccgctgcgacattggcaatgcccattcccaagccgatggcattggttttaagatgcagtttacgagtccattcctccacatcaggaacaacgggggctacaattgcagtagtatcgggtacgatttcaacggcttcaacgattggttttatcttaatggtatcaggtacaattacaggctcctgaacgggcggaagttcctgcttgtatgttacgaatacggcacaggcatttcgcatacgctcgaagaagagcttgttcatctgttgccataccttgccgttatccaaccgcttcagttttacgacacggttgtcaatatgggtattcggatgatgataatccaccaatagggattcttcctccaagatggagattacttcatccttatgtatcaatcccgaatcctcaatctgtgatttcagataatcccacgggatgtagctgtcattacgggtaatgaggctgtcgggaatatccacctccttgcggacaagtctttcgagtgcggtaaggcgacctcgtgccagtctgcggttgagttggtcactgccttcgggtgatgccgctccacagaaggatatttccacgatgttgattgtactgtcctgacggatattccgtaagaactcgatgatttcctgcatacgggcggcattgtccgagtatgcggaatctatgacagtactgttcacacggaaatcgacacagatttccgtgcggctctcttgcgaatgcgcagcacctacaccaaacagcaagagaatcagtgttatacaatatttcttaatgcgcataaatcagaattataggtcacttctctttggaagagtgatttatgcagtatatatctgttgaaaattagctgtttagttgaatgggcataacttattcgctcaacaatccgctttttgcccgaacaaaatcagaattttgcgtaacattttttagtgtaaattggttccatttgccgaaaaatgtgtaattttgcaacggtaatcatttctcttccaaagagacttttctttcgctcaacaatccttcactgtagctaacacttgaaaagggacccggaacaacatttaaaaagtgccccacccatgggtatgtttaaccgaacaaaattggtatattcataaaaaccaatggcgttcataatatgtaccacatggaagaaagagattccataattctcgcctataggcgtgacggattgagcatccgtgagatcgcccgtcgtaacggcatgagccgcaagactgtacgcaagtatctccgggctttcgaacaagcggtcggtgacaaccccgatgcggaagcaatggacacgtacctgcagcagccggtgcgctatgacagcagcaaacgtgtccgcagagtgatgaaccagcaggtgatggaggcgatagacggcttcatggcccgcaaccggtctaatgccgcggccggattgcgcaagcagcagatgcgcaagattgacatgtggcgccggttgcgcgatcaaggcatagagattgcctattcgacggtatgccagtatgtccgtgcattggaagtggcggtgtccgctccagccaagtccccggcggcgttcatccgccaggagtatgaaccggggttccggtgcgagtttgactggggcgtgctgacactttggattgccggtgtcaagacgaagctgcacatggccgtgttcacgatgaaccatagcaacctgcggcgggcatacctgttctcccgcgaggacacgttggccctgatggaagcacaccgcaactgcttccgtgctttggggggcacgccgcaagtaatggcctacgataacatgcgggtggccgtcaagaagttccttggacaggagcgcgaacataccgatgccctgcgccgcatggaactccactattgtttcacccctcatttctgtaatccgcgttcgggatgggagaaaggtaaggtggagcgttcggtggaacatatccgccggcgggctttcgcctatgatgtccgtttcggttcgctggagcaggcgcagtgtcatcttgacaaggtctgtgacaggctcaacggggaggcttccaacatgtctgcgcaagagaagaaggagcgcgtacaggccgatattgcggctttgcggccgcttgaccacggtgacatgggctgctttgagcagcggcatgcccgtgtcgggaagtattccaccattaccgtcgatggtgtgcattactctgtgcctgaccggcttgtcggtcgggaggtacccataaagatgtattccgagcgtattgtcgtgcttgacggtcgcgacaaggtagccacgcatgtacgctcccggcgtctcggtgactggtgtatcgacctgatgcactatctgggcacgttccttcgcaagcctgcggcgttgggacgatccacggccatgcgacaggtacacccggacgtggcggcactgtttcgcaaacattttacggattctcccagatcgtttgtcgaactgctcgtgtttacccgtgacaaccagcgcacttatgccgacatactggctgcggcagaccgtctgtcctcccggggactcaaacgcctgtcttccgaacaattgagcgccgagatgctggccagtgacggcaatggaaccgcaaacgtccgtcaagacgcagccaccctgaccccgtccgatccacaacagaccgccattgaagaatcggcctcacagacattggacacactttcggcgatgatcggatgtggcgccacacaacaacctgtaaacaaagttaccgtctaacaacataaaaattgcatagcaatggaacaaaacgaaaatcaagactccatacgcgaacggatacgtgcgtatgccttcgacctcaaactccctctggtacgacgcgacatcgacctgcttatacagcaaggacttgatgaacgatggaacctgtggatgttcacggccgaactcctgcgtcaggaaaaagaaaaccgctcggagaaccagcgtcggcatcgcatcaaaaatgccgcgttcccacagttgcgatacctcaacgaaatagacacggacgcgcttccgccagaagcgcggaaggccttgccaaaccttgagacacttgatttcatcaaggaagggcgcaaccttatactatacgggaatcccggtaccggaaagacccatctggctacagccttggggattgcggcctgtaacgcgggatactccgtactgttcacttccgtgcccagactgcttacgcagataagggaatgccggaacgcaatgacactaagggcactcgagaacaagttcgaacgatacgacatggtcatctgcgacgagttcggatacgtttcttgtgacaaggcgggagcggagatgttgttcaaccatctgtcactcagaactgacaagaaaacaaccgtcattacaacaaatctcgcattcaacagatgggacgagattattgcagacaaagtactagttacagcaatggtagacaggctaacgcacaaggcgattctactgaacatgacgggaaaatcgtacagaatgaaagaaacacaagatatgataaataaacaaatttaattaactttgcaaaacctatcgggtggtacacgtttcaaatgctacccgggtcccttttcaagtgttagctacaatccttcacttacagagatttcagaatcatactatttgctttatcaattgccatcgtgtccaatgaggcaagatagatgcgtgtggtcgcttctgaatcgtgacccattccctcgctgataaccgaaataggaacattcttgctcttggcgatgcttgcccaagcgtgacggctcacatacatcgtaagtggtacggacaatcccaattggttgccgatgacttttaggctacggttgatgttgtgtgccgtatagatgtattgcttgcgttcatctatttcgctgaggggtttgatgatgggcaacagatattgagacaacggattatcatacttttccactatctcctgcatacacttctcccatttgatgaatagctgttgccctgtcttgcgtctgcggtacgataaaatattgccgttcaagtcctttttccgtaggtatgccatatccacgaatgacataccacgagtgtaaaaacttagcataaacatatcacgggcaaaatcaagagtcggattcatcgacaaatccatctctttaatccgcttaaccgttttaagaggtacagctcgcttgacggttttatccacacctgtatagacgtgcttgaacgggtgtcgctgggtggtcaacttcttttccacggcacgattatatacagcccgaagattacgcatatagaatgatgaactgttggggcttactccgctacgcttcaagtaggcttcgtatgccatcatcatatcggaatccatattgtccaatgccaaatccttatcctcacgaaagcgccggaaactgctgagcgtagcagcatatgtttccgaagtacgtatcttgcccaatgttttcagattggatattacgccctccataaatgagaagagataattttctggattatccgctatgaactcggctattacatcatcagcggtatagtcacatccgctatgctcaaatactgaaataatcttttgaagagcctttacatccattcggattttatcgattatttccgacagataacgctttctctcatcattgaatcgtggtaataccacctccgacaagtgattgttccactcagagccgtagagacggtagcccgtcttttgctgacgggctacacgattgtggattacttgatagaaaattgtaccttgtccgccatcaaccgttgatggtcggaacttaatcttaactgttgccatatcacaatcagggttttgatttgttattcagattaaccttactatcgtcctgtttgttcttgatggacttggctcttgattcttgctcctttgctgcctgctctttgagccttgcttgctcggtaagggcggcttgcttacggacagcctcttcgtagatttccacatcctcacgcatctgctcaatcttttggttatctcggttgagttcgaagatgtcctccaaagtggctatatgttcagccgaagcatcgcctttcatttttatgtaacgatatttgaggtcattatcaatgcgttcatagttcggacgttttgccagatgtaaagcaactgataaaactgcaatggctgccgacatgattacaaaggttatcaagacatgaggttcatcaatgctgatacgaagatgcttggcattggctattccactttcgatattttcattggtttctcggaacatcttcttgaccttatcggattcctcctgctgtttagccttgatttctgccagcgagtttagcacatcgccagacgattgcgatttattgacaatcgctttcacatctggaaaatccagtgtaagctgccccctaaaaccaagcgattctgcccccttgtgctaaaataatcctacccccttgattccaatataaaaatacccctgcttggcaatgcccggcaggggatttttcgtagatttgattcccgtcttgaccggtgggataaaatcatttctactatgacaacaaagatagcaaacatcctccaatgttacgcattggggatggggataaagcagataagcaggagctttgagctttcccgcaacacggtgcgcagatatgtgcgcctgtttcaagagtgtggtataccgataaaggagttggccgccatgccttccgctcgcatccaggaaatgttctctgaaggtgttggccgtaacagggaaccgtcacaacgccagcttgagcttgaggcactccttcctgagtatgctgcccggcttagccgccgaggcgtaacagtgaaaaccctgtacgaagagtaccgcgagacccatcctgacggatacagacatgccagtttcggcaactatctcatgcgttaccgtatggtgacacatgtcgtaggccatgtcgagcattatgccggagaccagatgtatatcgacttcgccggtgacaaactggaagtcgttgacagtgaaagcggtgaatgtcgcagcgttgaagtgttcgtggccatacttccgtgcagccactatacctattgtgaggcggtctggtcccagtcaaggcaggacttgattaaggcgtgtgagaacgcgcttcatttttacggcggggttccgatggcgatcgtaccagacaacctcaaatcggcggtaacccgcagcgaccgtaacgagccggtaatcaacgaggagtttgcggcatttgccgaacactacggatgtaccgtataccccacacgggtacgtcatccaaaggacaaggccttggtggagaatgccgtgaagctactttaccgatccgtctacgctgacatcgagggtcttgtattccactcgctggagtctctgaatgcggccatatccgaatcgctctcggccttcaacggacgcaggatgagcgggcgtccccagtccagacgggaacagttcgagcagattgagtccgactgcctccgcccgcttcccgccatacgccatcagatgaaagagcgacgctccgcaacagtaatgcgtaacggctatgtcaccttcaggcttcaccattacagcgtaccgaaagagtatataggcaaacgtgtcgagattgtctatgatgcggacacgctggaaatatatcatggcctgcgtctggtgaccacacaccagcgcgatgacacgccatactcctatacgaccaaggatgcccacggactgcccggacgtcatggaagttatgaaaaggatctggaacagatttacgaacgagccggccagacagataacgtcctgctgctgtatctgcgcaaggtggcggaactcaagaagtatcctcccgcggcgttccgttcatgcagaggcatcatggcgttggagaagaccttcgggctggaacggttggtggcggcaagcgcatgcgccacgcaactgcgcctatacggatatcaggagataaggcggatccttgaacgcggggatgatgcagacttcctgtcaaaagacgacattgacgatgaggtccccgtaacatctatccacaaaaacatccgcggagcagcctacttcgcacaattaaaacatttaaatagagacaacaatggaaacaaataatcttaccgcaccgatagctgtcgaaaaagaccgcaacacgttgacaatcgaactgatgaaccgtatgaagctgcacggcatggccgccgccttcactgaaagcctaacctccactatggcagaaacaatgacaatcgaatctttcctgcacatgttacttgccagggaatgggactaccgtgccaatgcagccatccaacgccttatacgcggggcggcgttccgctacaaggcctgcctcgagcagatagactatgcaatcccgcgtggccttgaccgcaatcagatggagcggcttgcatcgctggagttcatccgcaagggacagaacctcttcatcacagggtcatccggtaccgggaagagcttccttgccacagcaatggggtatgaagcctgcaagaagggcatacggacatattatgcgaatgctccgaaacttatgggtacgcttaaggtggcaaaagtaaaaggcacactggaatcggaactcaagagaatcgaacggagcacgctgctcatattggatgacctcttccttgtgaaccttgatgccaaggaacgacccatcctgctcgatataatagaggaccgacatgggcgcaagtccatcatcatcacctcgcaactgccaacggacaattggtatgatgcaatcggagaccctacagtagcagatgccattatggatcgtattatacatacggcgcaccggattgagctgacaggagaaagtgtccgtaaaatggctgcatacagagggaaataaactaaaataataataaccccatcggtcaagactttttaagggggcattgttgaatgttttaagggggcagaatcgcctggttttagggggcagcttacactggattttccaccattatagtgagcagtggttacaatatgcttcaatggtatggagtatatccacaccgaggattgagcaagtccgacttcgtttctcagatacaaacaataatcacgaatgaaatcctcagtaagttcattcatagcaatatctgtacgcttatagtgtaccttaataaattctgcaagatatttccttacggtgagatacttttgatatgtacgcaaagaacgatctttgccaactcgtttggcaaaggcttcgttctccttgtcaaatgctcggagcagggtttcatactccgtacctataccttgataggcattgcgtaccatttcagcggttacaaatgcctcacggtctgaaatgcgttgatagtatttgatgatttgagccttgatattatccaaagcaagattgagttcccttgcttccttgctcttgcctttggctctgttgcctttcacatcccaaaggtctttgtggatgctctgcttgcaactgaattgggctactgagccgttgattgtcactcgtcccataatgggaacaataccgtttttctccttgcttccgttcacgtagaacagcaccttaaatgtacttcgcataatctaatcttttttggttacaaaattagttatcagcgagttatacattgatatacaaaatgatgcagaacgatgaaacgtgacgacacaaagaaaaactttacctcattatcgggtaatgatttgcaaactgtccgccttcattacccctcatttccttgcattattgccattgttcccgtttccagacttctcaacttaatgcgttatagctcagttcttaacgccaatattcgctttttttgctccgagaaccgtaatttttagagaaaattgcactaacagatgactccgtgcccatacggattcagcgtattcaccggaagcatactctacttttgcaaagttgatatagcaaaaagtaccacaaagcctttgccacctcctttttattaagtatttttgcgcgaaattttaaaaaacgacatattaataggtactatgaattggttagaaagcttgctatgggactcttcatctgtcgctcacatcgtttgtttgtatgcattcgtaatatctgtgggcgtattgctgggtaagattaagattttcggggtatcgttgggggttacattcgtcctctttgccggtatcctgatgggccattttggcttcacgggcgaaacacacattttgcattttatccgcgaattcggtttgattttatttgtattctgcatcggtctgcaagtcgggccctcctttttttcttcctttaagaaagggggtatgcggctgaacatgcttgctgtcggtatcgtgttgctgaatatcgcagtagcattgagcatctacttcattgacggagggatagacctgccaatgatagtaggtattctctatggtgccgtaaccaatactccgggtctgggtgccgcacaagaagccttgaaccagataaactatacgggagaccccattgcattgggatatgcctgcgcctatccgcttggtgtggtaggtatcataggttccatcatagccatccgctatatttgccgggtgaacctcaagaaggaggaacaggaactcaatacgcaggaagcagatgtaaagcatcagccgcacatgcttcacctcgaggtacgcaatgaatcaatttccggaaagaccctgctccagataaaggattttctgggacgcccgtttgtatgttcgcgcatacgccacgaggggcacgtcagtatccccaatcatgaaacaatattccacgtaggagaccagctcttcatcgtatgttccgaagaagatgccgaagcggtaaccgcctttatcggaaaagaaatacacgtagactgggaaaaacaggacactccgatggtttcccgccgtatcctcgtcactaaatctgaaatcaatggcaagaaactgggaagcctccacttccgcagcatgtacggtgtaaatgtaacccgtatcaaccgttcgggtatggacttgtttgccgatcccaatctggtacttcaggtaggtgaccgtgtaatggtggtaggccagcaggatgccgtagaacgtgtagccggcgtattgggtaatcagttgaaacgtttggacactccgaatatcgtaactatttttgtgggaatctttttgggaatcctgctgggaagcctccctattgcattcccgggtatgccgacaccggttaagttaggtcttgctggtggtccgctggtagttgccatcctcatcggacgtttcggtcacaaaatgcatcttgtgacgtacaccaccatgagtgccaacttgatgttgcgtgaaatcggtatcgtgctcttccttgccagtgtcggtatagaagctggtgagcattttgtacaaacagtagtagaaggtagcggattactgtatgtaggctatggattcctgataactgttatccccttgttgataatcggtatgatagcccgtttctactgcaaagtgaactacttcaccctgatgggtttgatagcaggtagcaacacagaccctcccgcattggcatacgccaatcagacatcaggcaatgatgctccggcagtaggttactccacggtatatccattgacaatgttcctgcgtattctggcgggacagatgatattactgacaatgatgtaggaggaattaaggaattaaaattaaaggctgcgtagttgggttaaaccaacattgcgcagcctttaattttaattccttaaagtttcagcttcttcttgacgaactcttctataaagtccaccgtagcttcaatacccaatacggaagaatcgatacacaagtggtatgtttcggcagctccccattttttgtagctgtagtagttatagtattcggcacgcttcttgtccgctttgttcatcatctcctccgcttcacgctcagtaatggaatacattcggcaaatacgcttgatgcgctcctcattggagcaggaaatgaagacattgacacagcgtggatgttctcgcaggatgtaatcggcacaacgccccacaaacaagcaggacttctcctccgccaatctgcgtatcacgtcactctgcactttgaacagagcatcattactcaagcaattcgtggctgggatagccccgtcactgacaaaagggaaacgcatgccgaagagccctccaataataccttgtgaagctttctcatcagctttctcaaaaaactcacaacacagtccactctcttcagaagccaacctaatcagttccttatcataaaagtcaatacccagacgggcagccagtttctcgcctatctcccgtccgccactgcccagttgacggcctatattgattataaaattattgcccatacgcttgttcatctattggtttgcagatagcaaatataaatattcttacggaatatctgcagaaagtaggaagaaaaattcaaagcctctcccccgacccatccctacaagggagaggttctgaatttgcggaattgacaaaccaacatcaccaatgctatcaaacttgcaagcaaatcggataccggcatgctgtaccacactcctgccactccgaaaaactgcggcaggacaagcaggcaaggaagcaggatcagcatctgccgggtgagggaaaggaatatcgctttgcctgccatgcctatgctctggaaaaagttggaagtcaccatctggaaaccaataatcgggaagaacattaccgtaatacgcagtcccgtgaccgaaagctctgtcagttccgcatccgatgtaaagatgcccaccaccaggtccggcaccagcataccgaccagaaagccgaaagtggtcactgccgtggcatagattatcgtcagtctcagcaccttgttcacccgtccgtacagcttcgccccaaagttatatccggcaataggctgcattccctgattcagccccatcacaatcatcactacaatgaaaaccagacggttcacgatgccgaaagccccgatagccaagtcgccgccatacttcttcaacccctgattgataatgataacgatgaagcaggctgccaggttcatcaggaaaggagacatgccgatagcaagcgaatcgaatacaatcttacgtttcagacggaatatcccccggtggaaatgcaacagctcgtccttattgctgaaaagcttgaactgccacgtcaaagagatgacttgcgccacaatggtagcgacggcagcgccacgtatgccccagccgaaaccatagataaacaccgggtcgagtatggtattgataaccaccgtggctatggtggcatacatcgccttctgcggatgccctgaagagcgtagcactgcattcagccccagatagaggtgcgtaacggcatttcccaaaaggataatctgcatataatccctggcgtagcccaccgtctggtcactgcctccgaagaaatagagaatcgggtcgagaaagagcatgacaatgatggtaaaggccactcccagcaccatgttcagcacaaagacattgcccagcacacgctgtgccgtgtcataatccctctgccccagcttgacggaaatcagtgtagaggctcccacacccaccagcgagccgaacgccgcagccagattcatcaacgggaaagtcaacgccaatcccgaaatagccatcgtcccaacgccgtgaccgatgaagatactgtctaccatattatataaagaagatgccgtcattgcgatgattgccggaacggcatattgcatcaagagtttacctatactttccgtccccaacgccgtgggagtcttttgtcctgccatattatatacctatttctttttagcgggtgcaaaagtactcttttttttaaacagaacagcagaaaaaacaccttaaacctgcacactatgcggatgatttatgctatctttgcgattcaatgataaatcataagatatgattaccataatcataccgtatgattgatataatcataccgtatgattggcacattcataccgtatgaaccatgcctgacctaccggttgagccggacacataataacaacaagcccccatggcattctataagaaagtaaaacagaaaggcgacgacaaatggcacccaagagccgtcaccaaaggacatccctatacaacggatgaaatagcccgattattgtcggaaatgtctacggtaaccccgggagatacctatgcagtattaatgaaccttggtgaagtgctgggcaagctgatgagctcgggacactccgtaaagctcaagggcatcgggacgttctactacacctgccgttcggaaggcaccggggtagacaccccagaagaagtgagtccggcgcaaatcactgcggtgcagatacgcttcatccccgaatactaccgcgggcaatgcggacaagtgacggaacgcaccctcctctccccgcatatcgaatgggtagatgccgaaggagaggattaatgtcactccccgttccctatatttcaaggaaaaaggttcgctatctgaaaaatgtttcgtacttttgtacccaaattgagtgaaatatagcgaaatgaacgtattagaactaagtgaacaagaaatcattcgtcgcaacagcatgaatgaacttcgcgcgatgggcattgagccttatcccgcagcagagtatgtaacaaatgctttctctaccgatattaaagctgaattcaacgacgatgcagagcctcgccaagtgtccgttgccggacgtatcatgagccgccgtatcatgggtaaagcatctttcatcgaattgcaggactccaaaggacgcatccaggtatatatcacccgcgatgacatctgcccggacgaggacaaggagatgtacaacaccgtgttcaaacgtttgctcgatttaggcgacttcatcggtatcgaaggattcgtattccgtacccagatgggcgaaatcagcatccatgccaagaagctgaccgtacttgcaaagagcatcaagcccctgcctatcgtgaaatataaggatggtgtggcttacgactctttcgaggaccccgaactgcgctaccgtcagcgttatgtagaccttatcgtaaacgacggcgtgaaagaaaaattcctgaagcgtgccaccgtcatcaagaccatgcgtgccgtgctggatgaagccggctacacggaagtggagacgccgattcttcaatccatccccggtggagcaagcgcccgtccgttcatcacccaccataactctctggatatggacctctacctgcgtatcgccaccgagctttacttgaagcgactgattgtgggcggattcgaaggtgtatatgaaataggcaagaacttccgtaacgagggtatggacaagaaccataacccggaattcacttgtatggagctgtacgtgcagtacaaggactacaactggatgatgagctttacggagaaattgctggaacgcatctgtatcgccgtaaacggctgtacagaaaccgagatagacggcaagaccatcagcttcaaagctccctaccgccgtctgcccatcctggaagccatcaaggaaaagaccggatacgacctcgaaggaaagagcgaggacgaaatccgccaggtgtgcaaggaactgaatatggagattgacgacaccatgggcaagggtaagctgattgatgaaatcttcggcgaattctgcgaaggaactttcatacagcccactttcatcaccgactatcccgtagagatgagcccgctgaccaagatgcaccgcagcaagccgggactgaccgaacgcttcgaactgatggtgaacggcaaggaacttgccaacgcttacagcgagctgaacgacccgatagaccaggaagaacgcttcaaagaccagcttcgcttgagcgaaaagggagacgacgaagcgatgttcatcgaccaggacttcctgaaagcattgcaatacggtatgcctcccacatcgggcatcggcatcggcatcgaccgtctgaccatgttgatgacgggcgaatcctttattcaggaagtgcttttcttcccgcagatgcgtccggaaaaggttatccccaaagatgctcctgcacgatacacggaactgggcatcccagaagattgggtagccgtaatccagaaggccggctacaacctggtgagtgacatgaaagatgtgaatccgcaaaagctccacatggacatctgcggtatcaacaaaaaatataaattggaactggcaaacccgaccgtaaacgaagttgctgactgggtcggaagaattaagaattaaaaattaaagaattaaataggcaagattaaagataagaggagggtgaaggtactcctttcccctcttttaatttttaatttttaattattaatttcgatatgaaactacccggtaagatagccatcatgggcggaggaagttgggcaactgccattgcaaaaatggttctgtcacaagcggagtctataaattggtacatgcgacgcgatgaccgtattgccgacttcaaacggcttggtcataaccctgcctacctgacgggcgtcaagtttgataccaagcgtatcaacttcaactccaacatcaatgatgtcgtgaaagaatctgatacgctcatcttcgttacaccttccccttatctgaaggttcacttgaagaaactgaagactaagattaaggataaattcatcatcactgccattaaaggtattgtgcccgatgacaacttgattgtctcggaatatttcactaaggaatatggcgtcccggctgagaatattgctgtattggcaggtccctgccatgcggaagaagtggctctggaacgcctttcttatttgaccattgcttgtcccgacaccgacaaggcttgcaccattgcccgcaaactggccagttcattcatcaagacctctgtcagtaatgacgttgccggcattgaatacagttcggtgctgaaaaatgtatatgccattgcagccggtatttgcagcggtctgaaatatggcgacaactttcaggctgtgctcatgtccaatgccatacaggaaatgaacagattcctgcaaacggtacatccgctgaacagaaacgtaagtgattccgtttatttaggtgacctgctggtgacgggatattctaatttcagccgcaaccgcacattcggtacgatgattggcaagggatactccgtaaaaagcgcgcagattgagatggaaatgattgctgaaggatattacggtacaaaatgtatcaaggaaatcaacaagcattatcatgtcaacatgcctattgtagatgcagtatacaacattctgtatgagcgtatctcgccgacgattgaaatcaagctgcttaccgattcattccggtaagcgcgaaaaaagataaaacgaaatactgaatttaaaacctagaatattatgattagtttgaacattgaaaagactcttggattcatctccaaagaaaacgttttcgcctatgaagcccaagtaaaggctgcacaggaagcattagagaatggtaccggtaagggcaacgacttcttaggctggctgcacctcccctcttccatcactaaagagcacctggccgacctaaaggctaccgcacagacgttgcgtgacaactgcgaggtagtagtagttgccggtattggcggaagttacctcggtgcacgtgcggtgatagaggctttgtcaaacagcttcacttggttgcaagacaagaaaacggctccggtcattctgtatgcaggacacaatatcggtgaagattatctatatgaactcaccgaatacttgaaagacaagaaattcggtgttatcaacatctccaaatccggtactaccactgaaacggccttggcgttccgtctgttgaaaaagcaatgcgaagaccaacgcggcaaggatatggcaaagaaggttatcgttgccatcaccgatgccaaaaagggcgctgcccgcgtaacggccgacaacgaaggctacaaatccttcatcatccccgataacgtgggcggacgtttctccgtactgactccggtaggcttgctgcccatcgcaatagcaggtttcgacattgagaaactggttgcaggtgcagttgccatggaaaaggcttgtggaaaagatgttccgtttgcagaaaatcctgctgccatctatgcagctacgcgtaacgagctctacaagaacggtaagaaaattgaaatcctcgtaaactacaatcccaaactgcactacgtaagcgaatggtggaagcagctttatggtgaatccgaaggtaaggaaaacaagggtatcttccctgctgccgtagatttctccaccgacctgcactccatgggacaatggattcaggaaggcgaacgtaccatctacgaaactgtcatctccgtggagaagacacagcactccctgcaagtaccttcggacgaagccaacctcgacggactgaacttcctggcaggcaagcacgtggacgaagtgaacaagatggctgaattgggcacacagcttgcccacgttgacggcggcgtacccaacatgcgcatcgttatccctgcactgaatgaagaaagcatcggaggtctgctctacttcttcgaaatagcttgcggtatcagcggttatattttgggagtcaatccgttcaaccaaccgggtgtggaagcatataagaagaatatgtttgcattgctgaacaagcccggctacgaagaagagtccaaagctatccaggcaagactttgataaattaagaattgagagttgagaattgagaaatggctgcacaacaagtgcgaagagaaccgttccccgattctcaactctctatttatctaccccgcatttttaaattctcaatctccaatctaccaagtgttcgaaaactctatcgcccgttatctggaaaagcacgggcacccctacatccaactgaaagccgttctttttgacatggacggtgtgttattcaactccatgccctaccatgccgatgcctggcataaagtaatggaacgtcatggcctgcacttgagccgtgaagaggcatacatgcacgagggacgtaccggagcctccaccatcaacatcgtttatcaacgccagtatggcaaggatgccactcccgagatgatagaaagcatctatgcagagaaaagcgccgaattcagtacccacccggaaccggaacgtatgccgggtgcttgggaagtgctgcaaaaggtaaaagcggcaggacttattccggtacttgtcaccggttcgggccaacactccctgctgaaccgccttgcccacaacttccctggtatgtttcagcgcgaccacatggtgaccgcctttgatgtgaaatacggaaagcctcatcctgagccttatctaatgggactggaaaaagccggagtacaagccaacgaagctatagttgtagaaaatgcacctatcggagtacaagccggaacagcagccggcatattcactgtggcagtcaataccggtccgctggacaggcaggtattactggatgccggagcagatttattgtttccgtccatgcaggcgctttgtgacgactgggaaaggttgcaaaccgcattagatgccagtaatagccttcgccacaaagattgacggcgacccaaacaataacagttgattcgagtttatataacaaagtactactgcatactttatcggtatacagtagtactttactgatttttatagtttaatcaatatctagcatgctgccgtatcgctctaaatatcatcactttatgtacagaaggcatctattgtctttcttcttaaagcgctccaatctatccattttctccttctcggtttctttaatagggaacgttattctacaggtatctttatcataatcatacaattctctggcaggaactacataaacagattccggactgtcaccacaccatccaaagccaaaaacataaaacaagttttttatcggacggttcaacagattggaattcatatacccctcgtacttttcaatgtcttttatatcgagataaaaacctatcttacttcgccatttacattctacagctataatatctccaacttcatgaatggtactcgttgtggtaacacactccatcaacaaatccggagatgatgaagacagaggcctataaccctcaatgtatttatcacctctccaatctaaaagccgccaaaatgttttcttgtcacagaggtccggataaccctctttactaatattagagttcttcacaacccattcctcaaatctatctcccaaatatttacttttcttcctttctttaaaatattgaaaggtatccataaaccgatattggaaaacacctacaaaatcatcgataaactgatttaatattttcatagccataatagtctattgtgtctttaaataatattcattgcaaacaaaaattcataggtgaagagccgcaacacccattttcaaaaatagattttttttcatttccaaaaatagagtttttttcccaattctttccagatttccttcccatctttgcaatacagaaaacaaataaagtattaattattaaaaatagaaaagtatgaaaaagttagttatgatgttggtttgtatgtttgcagtgcacacaatggtaatggcagataatgataagccgatagaggtgagccagttgccggcgaaggcgcagacatttatcaagacttattttaaagaccataaggtggcaatggctaaattggagtcgggaatgttttataaaagctatgatgtggtgttcacgaatggggagaaggtagaatttgataaatcgggagaatggaaggaggtacgatgcagacaaagtgaagttcctgcacagattgtaccggaagcgatacgtaactatgtaaagaccaattatccggatgcaagaattcttcagattgagtacgatgacaatgagtatgagataaagttgtctaatcgttgggaaattacatttgactctaaaatgagggtgattgacattgacgattgatgacaagaaagatttagaatatgtagattataaagttaagtatcaagaagctgaaaacagttgcttggagagggtttctccaggcaactgtttttttatgcacttccgtacggtagcagggcatatggtgctgcgctcattgtacaacagtagttgtactactattccaattgcccggagtcaacgaagccccggctgcacttttgcagttttttaatcagtgtgtccggagaaggacactcaaccttctccggagctgaaaatactgatttataaggaaacggcgcttctcggcgcttcctgccggaaggcgactcaggctatgacgcttttaggattttggcagacctcaccatggtataggtagtccccttagtacaatggcgcatatcattcagcttactgaaaaatagattttttttcagagaggttcgttcggcagagaaattccaaccgcagaacggaagaacaacgttttcagtccgtcataaaatcccggaagagcaaccgttccatgcgtctcttccgggaacttttttgataccacccgcaaatgccgcttctccatacgaggaactgcactccctataaaatcatctgtcaggggaaagtggatcagcttcctatcaagacgcggctgagtggcaaacgcaacatacagttgctttcctgaaaagtcaaccttatctacctgccgttctacctgtttctgaaaatatcctttatcccaccataaactggggtctatggcgatgtatgtatcaaatgcaccgggataattcagcaaaacatgcagcgtgaacaacccggcataagaatgtccagccaacaagtgttgtccattcaccggcaagtcttgttccactgcgaggcgtagctcctccgtcagaaaacggcaaaattgtcctgccccacccccttccggtttatcgcccggacggacagttccgtcacgccgggcagcggaacaggttggcgtaaagtctctggttctgtttgtattcaggacagccacaacgatacagggcggtaaggaagaaactttggaggtggaaaacaagcgagtaaaacctaccaccgaatgaaaaaaagaatcaccgtccagcaaataaagaaccggataactttcctctttttcacccgggcgggttgcaggtacatacacccaatattctctagcctcattcaagacatgcgaaaacaaagtgtggcgagtcccgatagaaatagcttcttgcgctctcagcggaaaaccgagccaagtgacaactaccaatatgaacagaatatgcaggcttctcatttcaattcttttttcagtctgcaaagttcgcagaaaataagttgactacctatccctatttttaggtattctcacggttgaaagctttccgcagaaatcaaaggctgattaagaaagtttgatgggcaactgaatttccgtcatccattcatccaccgtttctttgttccaaatgccgtcaatatggcaaaaccgggcacggtcaatgacctcgtatccatttgtctcggcatacgcaaaaagctcggcgaaagtttcgggcatatgctcataagcaccgtaatggttgacacagagcgcaaccggcacttccggaagttccttgaatttaatcagttccgaatcttccttgcgttcagccaccgcttcaaaaaactcgatatcaatatcaaccccatattcctcattatattccaccgtgaaacaatattccggggcaggacattcacaacccaaacggtacatttcaggcccgatgatattcggacaaagattgaacagctcctgataagagtctattttacggcgatgggtagcaaaaattcttgaagggagggatttcttaaacactttttccataacattctcttgtttatggagtaaattttccaatttggcaagttcggtctgccgccatatcaagtgttcaatctcgtttttgcaacgttctattttaaccttcaacaattcagcatccggaaattccttgccatcggcaaacaactcggatatctcttcgaggctgaaccctaattgcttgaggtaaacaatacggctcatacaccggagctggctgatgtcgtaatagcgataccccgtccactcatccacttcaacgggtatcatcaatcctatctcttcataatgacgaagcgtcttaacggtcacctggcaaagtttggaaaactctccgattttaaacttcattttattcttcataaactcatgcacattttgtttatgatgcaaagataggtcctgcccttagggacgagtcaagagattgcttcaaaaaaaacacatatttcactattcacaacggcaataggtgtttgcaccgcacgtacaatggggtaacaactgcccactcagttcatcgcggtaaaattcatacagccgccggtacatggtttcatagagtgcggcaatttgttgctcctgctcactttcattttgaaaacgatttttaaaggggtcttcaaaattaaaatgcacctgctgcttggcatccagagtgataaatttcagttcttctccggcttctttacatagggtaatcacgtagtcccacgaccggtgcgtataggtcccgacaccagacggtttcttgcgagacacgctgaaaccattctgttccatcacattgcacacggcatcgggaatgcagttcccctccataattcctgccgtagagatattcattcccctgccaaatgcatgcaggagttcctgcgcgatacggctgcggcacgtatcttcattacttattaacagtatatccattgtccgttacttttccaggtttaaatactcgccatctccttctttcttcatcttcgctttacgtgccaggtcgaacaaggtggggttaatgtggcaatatccaccaggatttttgtccagatagtcttgatgataatcttcggcgagatagaagttcttcaaaggctctatctctacaaccaacggacgggagtagttggcagccagccggtcaacggtttcacgaataacgggcaggtcggcggtatccgtataatagatacccgtgcgatactgtgtacctctatcccccccttgcttattgaggctggtagggtcaatcgttttgaaataaaggtcgataaggaaaggcaagtccacctcatcgggatcatactgtacttttacggtttcggcaaagtccgtggtaccggtacatacctgctgataggtaggattggctatatttccattggcatatcccacctgggtagcctccacaccttctatttgtttcaggaaatgttcggtaccccaaaaacatcctcctgccagataaatctctttcattggtttcatgtctgttctcctttctgaccgtccttccggcttaccggcataggacagacaagtcattaacattgcaaaaataaatattatttgtttcatacctctaactctatggaaattataacaagaaagagaaccgtatggttgacttttctggatgtattgtataaaaagaaactccctttgcaaagtattcatgcaaagggagttcctttctttgtgaccccggtgcgattcaaacgcacgaccttcagaaccggaatctgacgctctattcactaagctacggagccaaatgtggatgcaaaagtataaaaaaattagcagattcctaacattcaaacgctttttatatcaaaccgaggaatatttttattattactttgagaagactaaccgcaattacacaaacattttgttcttttttcccacaaaacagaagcaagtatcaatattattcctatctttgccgagcaatttaatagaagttatactgaataaatttatgagctacctgataacacctgaaggttacaaacctttattggacctaaaacagactgaattagggattaaacaaattaaagagttcttccaattgaacctctcttccgaactgcgcctgcgacgtgtgacagctccactgttcgtattgaaaggaatgggtatcaatgacgacctcaatggagtggaacgtgccgtaactttccctatcaaagatttgggcgacgccaaagctgaagtggtgcactccctcgccaaatggaaacgcctcacgcttgccgaataccatatcgaaccgggatatggcatctacacagacatgaatgccatccgtgccgatgaagaactgggcaatctgcattccctttatgtagaccagtgggactgggaacgcgtcattactgccgaagaccgcaatgtggaattcctcaaggagatagtaacccgtatctatgcagctatggtgcgcacagaatatatggtatatgagatgtatccgcaaatcaagccttgcctgccccagaaacttcactttatccatgccgaagaattgcgccaactgtatccggacttggaacccaaatgccgcgaacatgccatttgcaagaaatacggtgcagtgttcatcatcggtatcggatgcaagctgagcgacggcaagaagcacgacggacgcgccccggactacgacgactataccagcaaagggctgaacgacctccccggactgaacggtgacctcctgctatgggaccacatcctgcaacgcagcatcgaactttcctccatgggtatccgcgtagacaaggaagccctgcttcgccagctcaaagaggaaggcgaagaggaacgcctggaactttacttccacaaacgcttgatgaatgatacactgccgctttccatcggtggcggtatagggcagtcccgcctctgtatgttctatctgcgcaaggcgcatatcggtgagatacaagccagtatctggccggaagatatgcgcaaagagtgcaaggaacacaatatacacctgatttgatatacatttatcccgtcatataatataaagttcaccccctcaaaaggttggactttattttttattttgtactttagcatccgaaactactaacagatccaattatgaatgttcaaatagaagaaagctggaaagcacatctgcaacctgaatttgagaaagattatttccgtacattgactgattttgtacgggacgaatatgggaaatatgcaatatatcctccgggaaagctgatattcaatgcattcaacctatgcccttttgacaaagtaaaagtcgtgataatcggtcaagacccctatcatggtccgggacaagcacacggactttgtttctccgtaaatgacggtgttcctttccctccttccttacttaatattttcaaggaaataaaaaatgacattggcactgatgcccccactaccggcaatctgacacgctgggcagagcaaggcatattgctgctcaatgctaccctcaccgtacgtgcacaccaagccggttctcaccaaaaccgaggttgggaaacatttacagatgcggctatccgcattctcgccgaagaaaaagagcatcttgtatttattctttggggagcctacgcccaacgtaaaggggcattcatcgaccgtagccgacatctggtacttacctcggcacatccatctcccctatccgcttataacggcttcttcgggaacaagcatttcagcaaaacaaacgagtatttgcgggaacatggagagacggaaataatttggtaaacatcaataccactgaatattactctgagtctggcttctctgttcccatttcaagtcttgcaggatacttgcattggcacggatggtaaagttatagtatttccagcgtccgaaaggtgatatggcagccgtcatgctgaaacagtgcaggtcacgtgtgatgttgaaagcggtctgcgttatctccttcgcattgaagtcataaccggaattgaagctgacagcccatttattggtaagcttgacgttaccgtttatattaagggaattcaggctgaatttgtacggatagcgcatgttcttacgattaatgggcttactggtgtcttccgtaatattgaaaccggtactgaagttgatagaccaaggcatcttgaatacctgatagccgtcagcatcggcagcagccttttccttcttcttcttcggagtgctgtcctcggtagtttccccctccatgtcaccgtcttcctccgtcgaggcattctggtcttggccctgctcctcgtcatccttctgaccggtgaagaagttccttattttcttccacgaatcattgttcacggtccaactgaacgacgtaccatatcccgaccaacgaccgaaacggccatacgaccattccgtacggttaccgggcaccacccttccgttctcatcaaactcgtaagcataagtggcaaaggtagagctcatactcaacgtataactcttgctcaacttcagacggagattaaagctcaagtcactccaaggacgcacctgggcagccgtgttgtaactgatacccatactcaaatcgtcaatcaggctcaccttgcggatagagtcattcttatccttgaacttcatttcaaggttattggagatattgaaactgataagcccctgctttcctccacttggcggactgaacacctgaccggcataataggaatactgcacggtatcgcgaatgccgttctggtcttttatataagagtcataatagccaaaacgggacgaagtgaaatcgggcgcagcgctgaaactgatggagggagtgatgacgtgacgtatctgtatctccttcttcttcatgaacaatggcttgtacataccataaactttggtattgatacccagactggcactgtagtcgtatacacggtgaaagccgtaggtcgtatcattcacctccttgccttgctcatcgtcccagtccttcttcaccttgcgggtgtaccaacgctccgtatagtttacggtaggcgtcacattgaagtacttgaacaaagtaaacgtggcacttaccggaatctcatgctgcataccgttctcccaatcgcgtatcaagttcttcttgaacaactgattgtccttcgtcttgatgctgttcttcacacggccagtatagcgaacggaaatcttctcataccacttttcatctcccactgcatgtttgcgcttgaaagggaaaatggtactcaaggaaatggtcatgtccggtaaagtcaccgcgatagaggagtcgcgcatggtctgggcaatattacctgaagcggagatgctcagatgctggtcgggaaagttacgcgaatagctgacactggaagtcttggtattctgcgacattgcctgggagttgtacatattgccgatattggtacgctcataactactggtagcaaagttcacactggcagaaaaggtagaattcggactcgctttcgggtcctgccggtgagaccacaccaccttgaagtctttggcaaccgagtagtcgggcaagcctttgtcaccggtcttggtcacctgatagcttgcctgcagcaaaccggaatatttgtaacgcttcacatagttcgactccatattcagcgcccaagaacctttcgtgaagatatccgcccgcagcttcaagtccatttggtcactgatggcgaagtaatatccaccgtccgtcagaccgaagccacgattggagtcatccatataggtaggcatcagaaaaccggactggtaactgctagaaaacgggaaaaagaaaaatggaacggcaagcggaagcggcacatcctctactaccagataggcaggtcccgtcaccacgttctttttcggacgtaccttggcataagtcatctgcatataaaaatgggggtggtcatgatggtcacaagtcgtgtaacgaccgctcctcatatagagttcatcattattccctttcttagcattattaccggtcacgtatccctcgccctgctggctgacaacattgctgataagacctcttttactcttgaagttataacggatagtatcggtttcgtaggaggtgtccccgtctttgaagaccggtcttcccttggctgttcctacagaatcgaccacgccacgggcaaaaaccgtactgttgtccatatccatagagatgacatcagcctccaggtcagcacccggataactcacctttccctggccgtaaagatgggcaaagccactctgcgtaaatacaatggagtcattggcttcgtaggctacgggagcatccaatgcatccttcttgggaggcgcagccgctaccgtatcttgttgcaacgaatcggcaggaagcccctttcccccttgcaggaagtctcccatctgcaaactatcccctacctgcaacgtgtctgtccgctgaatattcggaggcgcgaccttcgctctacggcgctgagaagcagccccaccggagagaagaagcaagacgaatagtagtatgaatgatatgaatgtatttgctttcaatggcgtcattaactaatagtttacgcttggaggggcaaaagtacataatttatacggataatctccctttttaaagaaatttagattgctacaagaactgttcgcaccaattatcaaagcgccgtaccccttcttcaccataacgttccaaacttttacgggctttttctacacttttctccttttccaaatgagtttttgaataaaacttatcggcaaaacagatagcttgttcttccaagctgaccggaaccatttcacgatgcggtacgggcaaatcctgcgcaatgattccctccaatgaaagtccggcacccgtatggcgttcacaaaccaaagcatggcggggatagccttcgccgcgtatcaggtcggctcccaaataaccgtgacagatataaggcttgtcgccaaaacaatggatacctgccgcatctgtaagaaaaatgcctatatcgtgcagcatggcagcctcgtacagaaaatccttatccaatgaaagttccggatggcggtcggcaatccataacgacttgtcggctacggaacggctgtgcgtcaacagtatatgccgcaactcattctcttccggataatatttgttaatgatatctatcggattcattttaagttatgagttatgagttataaattatgggttatgaatgtcaatcgccctaaatttatacatgcagatttcattacgcatatcacaactgcgtctgtctgtacggaatatcttttccagatgatacgtctgttccagctctcccaacatattctcctcctcctttacgggaaccaacaaatagccctccccgctggacggacgttccttttcaatgtgccgcatgcggtctttcagatagaagttaacaccatagaaactcattttcgagtaagaatagaccacaccttccggaacatacgtattgaccctttcagccaaatgtttatctgatttcacagccagcaccgtgggctgataaaccgaatccaatgatacgaaaaggcagagcatacatcctgctatgccatataataatgaccggctatccgcacgctttatcaccatgcgtaatgtgcagacagcggctactacgggaagcgctaccaggagccacttgggaacagacaaagccacatcctccaacgcatgcataaaggctacattctcagcggcatggcgtccgcttccaaaaacgctgtcgggaaccaggccgagacgaactacgacaaaaacaagcgtaagcaacaagcccaaagaagcaaagatgattgcacaaatcctgaaaactcgtgcccccttttgtaccaaagccaacagatactcagctatcagcactgccataaacggatagatgggaagcagataaacgctccgcttactcttggggatgcagtagaagacaaagattatcagaatgaccagccacgtgaacaattgtaccggagactggttgcggaaagcagtccagcccttcttcaaccgcaacagcagggtctccccttccggcagacaacgcatgtttttccacttcaagccaaacaaggaaattaccagaaccaacgtccagggaatccatccccaaatcaaagtcaggaaattataccatataggattttcatgggactcgtaggacattttgcccataaaccgcccggtattctcctccagaaccaaatcgaggaacggttgtccaccttgtctgtaagctacgtatacccaagctaaataaggaacaaaagaaagcaagccgatacctaccaacgagaaaaacgctttccagaaagaacgtccgcacaacaactgatacacaccgatacacgcgcaagggaatatggagcctaccggccctttggtcaacgtggcacatcccatcagcaacaccgcaagccagggcactccgcggcatcccttctcatcccagcggaacagcagacaaagggaaataacgataaaggcaacctgaaccatatcgacccgacaagcgacagccgcccgatgcacctcgaaagaagacaaaagaagaatagaggccagaaacgccgtttgaacgtttttacgttttgccacaaaggcaaagaacatcaactgcatggctaaaaaagccaatgcagacgggaaacgggcggaaaactccgtcacctctccaaaaagggaagagacggcggctattgaccagtagaagaaagggggtttataagcaatatcagtaccatagttcaccggaagtatccagtttccactttccagcatagaaagggcaacaatcgcctcccgcggttcccccttggaataaaaaatggtttctcccagaaagggaacaaccacaagcacactcagcagcgcaataaaccagaacgccttctttctgtccgacataccttatttgttttttatgttttctggacgcaaagatagcgcaaaccgaaagcagatgcaaatttatttgcaatttgctgagatgcagcttaatttcgcaaagcaaaattacaaataattctgaaacaatgcctaactttgccgccccaatgataatggcaacagagagtagatatttaatgttaagatgaagcggctgaaacaactaccggaatttgtacgcttcgtaatggtgggcatctttgcgacagctctgcactacggattgtattttgtattacaacgggttatcaatgtaaacatagcctatacactgggatatgctctcagcttcatcgccaatttctatctgactgcttactttaccttcggccgaaagccctcatggagaaaagccttcggatttggaggagcacacttatgcagctatctgctacacatggggttgctgaacctctctctctggatgggcatccccaaacctctggcccccattccggttttcgccatcgccattccggtcaacttcttactcgtacgtttcgttttcaaaagaaaagagtgataatttgtttttctcccgatttcttacgaatattgcaaaaagatttgttctatgatggaaaactctcccatactcgccgttgtcgtaccttgctacaaagaagaggcagtgctgcatgaaacccataaacgattgagccaattattcgaccggctgatacaagcccggcaaatttccccggaaagctatatattatatgtaaacgacggaagcaccgaccagacatgggctatcatcaaagaactgcaccaaaatacggcctatgcctgcggactgaacctggcaggaaacgtaggacaccagaatgccctgctggcaggactcaatgcagtaaaagagcgttgcgagatagccatctccattgatgcagacttgcaagatgacatccaggtgattccggacatgataaacagctataaagcgggcaatgacatcgtttatggcgtacgtaaagaacggaagaccgacactttcttcaaacgcaacaccgctttggtcttttatcggctgatgaaggcaatgggggtaaaatccgtctacaaccatgccgactaccgcctgatgagccagcgggctatacaacacctatgccgcttccgcgagcgcaacctttttcttcgggggctggttcccctcatcggctaccagacggacagcgtgtactacaatcgtgacaagcgttttgccggagaatcaaagtaccctttccggaagatgctcaactttgccattgacggcatcacttctttttccgtcaaaccagtccgtatgattttttggataggctgcatatttattcttgtggcactatgtgtcaccggatggacacttcactcctacacacagcataacaccgttcccggatggtcatcactgatgatttccgtctggttggtaggaggcgtgatacttgtgtccttgggaattgtgggcgaatacatcggcaaaatatacattgaggtgaaggaccgaccgcgctacaatgaagaagagcttctgatgccatccgacaaaacagaataaaagaagcccatcatcattctacacaaaagtttaaaaaaggaaaaacacttatcacgctatcacactataataaaggtatagggaacagtatgtgtctttcttgccgacaagttggcaagattttgccaccctattggcaagactttgccaccgcgttggcaaaactttgccataggcatggcaaaagtttgccaaaagcatggcaatgggttggcaaaattactctctggcagacaatgagttaacataactatcaaaatcgtatcgtcacatcagtttatcctcaaatccgcaactacgcgcctaatatgatacagaagcgaaaagaatctgcatcgttagtaaaaagggggcacagtgcatcgaatgtcaccataaagacatataaatgccccttaccccaccatgcgacttgaggcaatacgcaaaatcacgactataagttgtcggtgttatccaaagtcattctggaacacattggcataagcattgttgcatgaatagatattcagcacatacttccttgatgtcctgacccatttggctggcacagagatgaacttaaagacaaacgtcttgatgcggcttgttgctttgagtccgaacctcttcacgtcaagcctcgccatgatgaatttatagaagttgcgtatgagtgccataagcagaagaaacaccgtgttttctcccataaaggattttggaagcctgttccagccgaatccgttattcatatcatcgaagatgcgttccttccctccacggaggttatagaattcgacaatctctttctcggaagactcgtagtcatttgtaaggatgcagcggtaggtgtattctccttcccacaggtcgagttcgccgtctatccgcttctgtctttgaatcacaagacggtatgccttccctttccatttctcgatgagaatggaggccagctcaaactcaatgccgcccaattccactttcttccaacctctgagggcaaagatgtcattgtagagcgaactgcatcggttagcacggatatagaaggtcttgcagtgtttagcaatctcttccactatctcttcagaacacgagccgcaatcagctctgaaacggttgataataagcttgttttgttcaaacctttcaaagaacctcttcagcgtgtccttctggtggaaacggacatttgtgttgccgtcgctgttctcaatgccgacaatcaagttgccaataaccgccacgccagggcgataaccaaggaacttcttgtatgtaggcttcgcatcaaacttctcagcctctatgaactggtggtcgaagtcaacgtcatacccctcgccctctttcagctgccctgtggacaataggcaattgaggagcagtgtattcagcttgtctgccgtgttgaagtcgtaggtcttgccagtgtcggatgtgtaggaaatgttatcctgggtcagttcctttatggctctaagaatcgtgtcggcactgcatgtgcgaagtgtcggatgaagcgaaaggtggtacatcagatgagtggtgacatcctcgatgcatgagccgccacaaaaataaacgctcataagcgaacggatgatttcgctgtattgataaccatacagcctgcatctcataccgagggttgagtcgattacagatgagagtctggagtcaaattgctccattattgaaaatattcctccaaaaggagtgagtttctcggatttaattgctacctttgccatgtctgtcgggtttgatacatattttgatttgcaacactaagataggtgaaaaatctgacatggcaaattcctgagcaactttttgttgctcaggtacttaaaaagttatatttgtaatagtgttgcggaattaaggtttatatcaaaaaacacaaaatcgcttgcgaaagcgacataaatgccgtatcttagtacacgtgcaagcaaaccattttgcttacacatgataaaaatctgcttatgggaacattaggctgcatcaatgacatgctacaaagggataaagagaaccgtgctctccgcaagctgagcagaggacggatgcgggagcactacaaataccttgtagacagaaaaggtcctgagagagccgatgtaaccattgaggaaatagaaaaaatccgaagaaatactactgaaaaggaattgtcagataaagaacatctattcagggcaaagacgattcttgcagcatgtgctttagtcttgcttttattgggagtactttgttataaattgttcttataagcaggtctgaaaccaattggcaagaaatctacccggttaaattcatcagccattggctggcgattgaaagcagattcccatgcttcataaaaattcgcatactttttatattcgaagcagagaatcaacaacttgattttcctaaaccaataaattagaaatgaaaagattatctttgcaaacacaataaatacattgaaagactttctgttagaacatggaacatctaaaagcatacattttagcacttaaaaacatgaatacagattttacaattagaattgcccaacagtctgatgcccttgaacttatgagtttgtttcaagagacagtcctccatataaacaaacgtgactattcagaagcagaagtggcagattgggcatcgtgcggaaacgacctctcccacataaaagacatgattaagacacattattttattgtggcaaccaatcaacagtcacagattgtcggcttttcatccattacccaccaaggatatttgcattctatgtttgttcataaagattttcaaggtaaaggcattgctaccatacttctaaatgagatagaacggtatgcaaccgcaagaggaatcatgcgaattacatcagaagtaagcctgacagcccgtccattctttgagaaaagaggctatatagtagaagtggaacagaaacgcaaagccaaccaactttatctcaccaatttttggatggcgaaaaggctggctgaatgaaatcgtataacggacgtattcctgcttgtggtgtcttttgtggtggttgtcccatatacacaagagaaaaaagtccctgcaaaggagcagaacagaatggttctcgctgtgaaaaatgtaaaacattccatttatgttgcttggaaaaaagaataacacattgtttccagtgttctgatttcccatgtactaaattcaaaagatttaccaaacgttggctaaaatacggacaaaacttcattgaaaaccaaaagcttttaaaaaacgttggtgaagttaaatttttaaagtattataataagagaatccacaaccaacttaccaacaatgacaaaaaatcaggaataaaataataattttgtacctttcgaaaaacatgtgttgtaaatgacagattttaattcatacatgggcaatatagacactgacttttttagggaactgtgtttaagaaacggagaactacggtattataaaagaaatgaatttatcctccgagagggagaagtcggttctttcttcgggtttattgtatccggtgtaatcaaatatacctgcatcaaccaaactgaaaacaaaacatataatgtaggtttttcttttgccaatgaatttatctctgattatcccaattgtttatacgacataaaatctgaattgaatatacaagcaataaccccatgtagaatctacatctgttcttccgaattacttctacaagaatttgaagagaacaaagaaaatcaacgaatagcccgtattgcagccgaacaattattttttcagtcgtattcacgttacttggatttgttcagatttacatcggaagaacgctatctccaacttcttaaaaaatgtccagaaatcctacaaatggtacccctaaaagaaattgcgtcttacttgaaaataacccctattcacatgagccgcatcagacacaaacagagttttgacagcaaagaataaacataggtttagaaattcaatcatttaacaatattccaagacaatattgattctgtcaggaagttctcttttatttttgccctatcctttggctgattcagcgaaaggcaggaatgaaaggagttaaacatagagtcctatatatgagaacaagaaaagtatttagaatgccacttgataaaattctttgtttatcagccaatgctatattaaccattattgcactatggagtattgcatcagtctttttcgaaaacgccacaattgattctataatagcccgtttcagcgtggcttctgcctgcatggccaacctattttcaaaacatcgtcttatccggataatattcctcattatggcatttgtactgataattgttgcaaccgccctctatgtccataaagcaaataagatgtaaaatactcagcagttattccgtctcatttttccttttcttccacagctgataactattgattatattctgccacagcacatacgatcccggaccgacggaagataacggattaagataagtatatgccatccagatggcaagcaccgtattcttttgccccagcgcctgccctccgctaatgcgctcaccataatgaccgccgattctctttcccaaatagaattgtatacagcaggttatcagtcccgccagggctatcagcagttcaacaaataccggtgcatcactattgaccaatgaacgtaccgtctgccctgagacaatggcaagagctaccgcccacaaatagaaggctgcatcatggaaacccaacagaaaatgatgcaccttcggcacaaacgcacgcagaaaccatgccagcaagaaaggacaaagcagcaatggaaagactttactcagaattttcaggaatgcaacaaaaaaagtaatgtcagcatgaggctccaccaacgggaaaaccaaaggaacagccacagccgccagaagattggacaacaacgtataggtcgtcaggctggatgcgcttccacccagtttaccggtaatgacagccgcagcagtcgcagtgggacaaatgaggcagaccatcgcaccttcaaacacttcccggtagacctcctccataggacaacacaccaacaataccgcaacaatcaagcaagaaaccgtctggaacagcagtaaccatccatgccacgatttgggtttcagttcatgcacctccaccttgcagaaagtgagcagaagttgggaaaaaatcaaaagcggagtcaggaaagccactaacccattcacataaggtttggcaggcgccacaaaaggaatgtctgcaaaaaagaaatatcccaaagtaccggcaagcattgccaaaggcaacgtccagttctttataaaacgaaccagcatacttgatttgctattttaattatctgccgcaaagttacgcatattatcaatacattgagccactaattactcaaacacagacattaattacactaaaaatgagaagaagaacaataaaactgaacataatccattagttttctataaatttccactacatttgccaagcgaaaaggaagcattgtctttgctacaattatatgaaactatacagacgatacatattatatataagtatatgcttagggctgcttatctcccccttttgcagtggcagcgctgaagcgaaagactttgttgtcgttatagaccccggacacggtggacacgacccgggtgcagtgggaaaaatttccaaagagaagaatatcaacctgaatgtagcactcaaacttggcaaacaaatcaagaagaactgccctgatgtaaaagttatctatacgcgggaccgggacatattcatccccttggaccggcgcgctgaaattgccaataacgccaaagctgatttgttcatctccatacataccaatgccctggccaaaaaccggacggccaaaggagcctccacctggacactgggtctggcaaaatcggatgccaatctggaagtagccaagcgcgaaaatgccgttatcctctacgaaagcgactacaagacgcggtatgccggcttcaatcccaactcggcagagtcctacatcatcttcgaattcatgcaagacaaatacatgtcacagagtgtgcacctcgcctccctcgtacaaaagcatttccgccaaacctgcaaacgtacagatcggggcgtgcaccaggcaggttttctggtattgaaggccagtgccatgccaagcatactggtggaactcggattcatctccacaccggaagaggaacggtacctgaacactgaagcaggaaccacctcacttgccaacggtatcttccgcgctttcctcacctataagcgcgagcaggaaatccggttgaacggaagcagcaataccattcttccggaggatgtacccgagcccgttcaagaagaaggcaacgcagctacagcgacaccggaaaagaaaaatgcacctcaagcggagagtaaccaagctgcccaacgcccgcaaaggtcagaaaatgcagccgtttcccaaacagaacagagcggcatcgtgtttaagatacagatactcacttcttcacgtcctctggccaagaatgacaaaagactgaaaggactgaaagacgtggattattataaagaaggcggaatctacaaatatacgtacggcgcatcacccgattacaacaaggtgctgcgcagcaaacgtagcattacggacaaattcaaggacgcattcatcattgcgttcaagaatggagaaaagataaacgtcaacacagccatcagcgaatttaaaaagaacagaaataaataacaaaagatacatcatgaagtatattacaaaagaagttagaataggaatagcaggcatagctgcactttgcatattggtatacggcatcaactacctgaaagggataaatatgttcaagccctccagctatttctacgtgaaattccagaatgtcaatgggctgacaaaatccagcccggtctttgccgacggcttccgcgtgggtattgtccgcgacttgtactacgactatacccaaccgggcaaagtcgttgccgaaatagatgttgacccagagctgcgcattcccaaaggaagtacggcagaactggcagccgaaatgcttggcggcgtaaagatgaacctgctgcttgccaataacccacgggagaaataccagattggagacacaatccccggcgtgctgaacaacggaatgatggaaaaagttgccaccatgatgccgcaagtagagaagatgctgcccaagctggattccatcctcgcatccttaaatgtcatactagccgaccccgccatccctgcaaccttgcataacgtacaagatttaacagcaagtatggccgtcacaagccgccagttgcaaactctaatgaaggatgatattccacaactgaccggcaagctcaataccattggagacaactttgcactcatttccaacaacttaaaggagatagattatgctgccgccatgcaaaaggtagacgcaactttgaacaatgtaaaaatgattacagacaaattgaaccagaaagacaataccgtcggacttttgctaaacgacccttctctatataataatctgaacgccaccactgccaacgcagcaagtttattggaagacttgaaatcgcatccgaaacgatacgtccatttctccctattcggcaagaaagataagtaaaagatggacgttatatagattttgtctaaataataagtctataaaggaattaaaaggaaagccctcatttgctctatacaaggagcgaaaaagggctttttcctgctctgggcacagaaagaaaacaagagacgcaaagctacataaaccactatatgacaaagtattagataaatgcaacacaccttatataaggagtatactcatagtaaccgataagtagctgaaagtaaagagcttattactttccctaaaaacgcaagaaaaaaaaggatttgtttttctcgaataagattgccaattttgcaatcgtagaagttatgcttaattaataaatgtatttatagccgttatgagtgaaatagatcatgtcgggctgtggaaccgctgtcttgaaatcatcagagacaatgttccggagcagacatacaaaacatggtttcttcccatcatacctttaaaatatgaagacaaaacgctggtcgtacaagtgcccagccagttcttctatgagtttttggaggacaaatttgttgatttgttgcgcaagactctctataaggtcattggtgagggaactaaattaatgtataacgtaatggtggacaagagctcgcggaaaaccgtcgacctggagtctacacagcgtaccatcataccgcaaaaacaagtgatggacaaaaggattccgcagattcccgtccccgaacttgacccgcaccttaatccagaatacaactttgaaaccttcatcgaaggttacagcaacaagctatcgcgcagcgttgcagaagctgtcgctctcaatccggctaaaacaatcttcaatccgctgttcctatacggagcatcaggtgtaggcaaaacccatcttgccaatgctatcggaaccaaaatcaaggaactatacccggagaaaagggtattgtatgtatccgcacacctattccaagtgcaatacaccgattccgtacgtaacaatacgactaacgacttcatcaacttctaccagaccattgatattctaatcattgatgatattcaggaatttgccggcgtgaccaaaacgcagaatacattcttccatatcttcaaccatctgcatcagaacggcaagcagctcatcctcacttccgaccgtgcaccggtattgctgcagggcatggaagagcgtctgattacacgttttaaatggggaatggtggctgagctggagaaacctaccgtagaactccgcaagaacattctgcgcaacaagatacaccgtgacggcctgcagttcccccaggaagtgattgactatattgcagagaacgtgggcgacagtgtacgtgacctggagggcatcgtcatttccattatggcgcattccaccatatacaataaagaaatagacctggaactgacgcaacgtatcgtccgcaaggtagtgaacagcgaaagcaaggcagtgactgtcgatgaaatcatcaacaccgtatgcaagcacttcggattggaaactgccaccatccacacaaaatccagaaagcgggaagtggtgcaagcacgacaaatagccatgtatttagccaaaaactatacagacttctctacagcaaaaatcggtgcgctaattggacataaagaccatgccactgtattgcatgcatgtaaaaccatcaaagagctgaaagaggtagacaaatcattccgtgcggaaattgacgagattcaagccgcactgaaaaaaggataagaataaggataagggattaaatgcagctaagtatgcattagcttaaccccttatccctaatccttaattttcaaaatccctgctttttcattatcttccaaagattctccgacattgcctcactgtctttcttcgtataacgcacatctgtaaagacctgcgccagcgtttccttattgttctccaagatgaactgcttgttctcaggaagcgattctttataggcatacaaccggtcaatgtcctgaggagtataatcatgataaacctcttcgtgtacaatggcctccagcggcaaacggtccacttgttccggctgttcggcaggccatcccactgtgactgtcgtgatgggaaacaccaattccggtaactccaacgcttcgacaatcatctgagggttgtaagtggtagttcccagatagcaaatgcccaaccccttctcctcggcagccacacaaaaagtctgtgccaccagcaaggtatcgacagcccccgtcacaaaccactcaaagttgttgtatcccggctcagccttacgttgctcacaccacttgctgaagcggcgcaaatctatgcagaaagtaagcactaccggcgccgtccgaaccatcggctgattgaaatgtgcaggcgccagtttggctttacgctctgcatcacgcgtcacaatcacactataaacctgcatgttcccgactgtagaagcccggaaagaggtttcaagcaaatcatttaacaaatcagcagaaatatccttctgctggtattttcggattgttctcctttgtttcaagctttccattctttctttttttgcaaagataatgtaatccacgaacaattcattcaagagttcacactttttttatcatcatatatccggaataaaatacatcttttcaacaagaaatgaacaattattatctctacgagcagataaaagtaaccttatgttcgactaaaccgagaacctttcagcccaacaagttgttaataaattccattttggaaaacttattcgtttactcaaatcattaaaacattataaaccaataaattaacagcaatcaatagaaaactatacatcggttgataaaaacattcattttaattttgccaagttgaaaaacattcatagctttgcaaatgcatttgttaacgataagtacaacttctacaactttacttatttgtaactaatcctaagagatacaacattgtggaaaagaaaaattattcttatgacgaagcctacggagaatctttaaaatacttccaaggcgacgagttggctgccagagtttgggtaaacaaatatgcagtcaaagattctttcggaaatatttacgaaaagtctccggaagacatgcattggcgaatagccaatgaggtagcccgcattgaggccaagtaccccaatccattaagttcagaggaatttttcggcttactcgaccacttcaagtacattgttccgcaaggaagcccgatgaccggaatcggaaacaactatcaggtagcctctctgtccaactgctttgttatcggtgtggacggcgaagcggattcttatggtgccatcttcaagatagacgaagaacaagtacagctgatgaaacgccgtggcggcgtgggacacgacttatcccatatccgtccgaaaggttcaccggtaaagaactcggcactgacctccaccggcttggttcccttcatggaacgctattcaaactctacacgcgaagtagctcaagatggacgccgcggcgcactgatgctcagcgtatccatcaaacaccccgactcggaagccttcatcgatgccaagatgactgagggcaaagtgaccggagccaacgtttccgtaaaactgaccgacgacttcatgcaggccgccatcgaaggcaaaccatatacacagcaatatccgattgacgccacagagccggcatttcaaaaagacattgacgcatccgcattatggaaaaagattgtgcacaatgcatggaaatcggcagaacccggtgtattgttctgggataccatattaaaggaatccgtgcccgactgctatgcagacctgggctaccgtaccgtatccaccaatccatgcggcgaaattccactgtgcccgtacgactcctgccgtctgctcgccatcaacctttactcatacgtggtcaatccgttcaagccggacgcctactttgactttgagctattcaagaagcatgtagctttggcccaacgcatcatggacgatatcatcgaccttgaactggagaagatagagcgcatcatgagcaagatagatgccgaccccgaaagtgaagacgtgaaacatacagaacgcgttttgtggcagaagatttacaagaaaagcgcccaaggccgccgtaccggtgtaggtatcacggcagaaggcgacatgcttgccgccctgggattgcgttatggcactgaagaggcaaccgaattctcggagcaagtacacaagacggtggcactcaacgcctatcgctcctccatagaaatggccaaagaacgcggcgcattcgaggtatacgatacagaacgcgaaaagaacaacccgttcatcaaccgcctgcgtgaagctgacccggaaatgtacgaggagatgaagaagtacggacgccgcaacattgcctgtctgaccatcgccccgaccggcaccaccagcctgatgactcaaaccacctccggtatcgagcccgtattcctgcccgtgtacaagcgccgccgcaaagtgaatcccaacgatacgaacgtccatgtggacttcatcgacgaaaccggagatgcctttgaagaatatatcgtgttccaccccaagttcgtgacttggatggaagcacaaggatacaaccccgccaaacgctacacgcaggaagaagtggatgccctggtagagaaatcaccttattataaagcaacctccaacgacgtggactggctgatgaaagtcaagatgcagggacgtatccaaaaatgggtggaccactctatcagcgtaaccatcaacctgccgaacgacgtagacgaagacctcgtgaaccgtctgtatgtagaagcatggaaatccggctgcaagggctgtacggtttaccgcgacggttcgcgttccggcgtgctcatctctaccaagagcgacaagaagtccgagcttcccccgtgcaaaccgcctacagtcgttgaaacacgtcccagaatattggatgcagacgttgtccgcttccagaacaacaaggagaaatgggtggcattcgtcggcttgctggacaatcatccctacgaaatattcaccggtgtgctggatgatgatgaaggcatcatcctgccgaagaatgtggtgtcgggccacatcatcaagaatgtggatgagcacggaaacaagcgttacgacttccagttcgagaacaagcgcggatacaaagtcaccatcgaggggctgtccgagaagttcaacaaagagtattggaactatgccaagctgatttccggtgtattgcgctaccgcatgcctatcgagcaggtcatcaagctggtaggttcactgcaactggacagcgaaaacatcaacacctggaagaacggtgtggaacgcgccctgaagaaatacatccaggacggcacggaagccaaaggcaagaaatgccccaactgcggtaacgaaacactggtttaccaagaaggttgcctcatctgcaagacgtgcggagcttcccgctgtggataatcccacggcaagcacaaacgtttgcataggaatttaaatgacttagataacggtagctgcatgattatgaggaataatttctatacttgcataatcattgcagctattgctacttctaaatctaatataatatgacactaatattcaatatcgagtatcgcaccagctggggtgaagaagtcagagtcctgggttccatcccggaacttggcaacaaccagcccgacaaagccacccccctgcacactgtagacggcattcactggaccgcggaagtggatatccagattcccggtaatggaagcgtcgaatacagttaccacatctatcgagatggcagaaccatacggacagagtggaacagcctgccacgcatcctgcacgttgcagacaatccgaagaaagtttaccgcatagaagattgttggaagaatctgcccgagcagcagtatttttatacatccgctttcacagaatccctgctggcgcatcgcgaacgcagtgccgccccgaaaagctacaaaaaggggttgctgataaaggcgtacgccccctgcatagacagtgaccattgcctggcactctgcggaaaccagaaggcgctgggtgactggaacccggacaaagctgcccttatgagcgacatcgacttccccgaatggcaggtagaagtggatgccggcaaaatcagcttcccgctagagtataaattcgtcctttacaacaagaaagagcgccgtgccgtggcctgggagaacaatcccaaccgctatatggccgacccgcagatagccgccaacgaaacgctggctgtcggcgaccgttatgtatacttcaatcttcctgcatggaaaggttccggagtagccgtacccgtattctccctgcgctccgagaaaagcttcggtgtaggcgatttcggcgacttgaagcgcatgattgactgggcagttgccaccaatcagaaggcggtgcagattctgcccatcaacgacactaccatgacgcatacctggacagactcctacccttacagtagcatctccatctatgccttccatcccatgtacgccgacctgaagcagttgggcagcttgaaggacaagaaggtgatggccgaattcaacaaacgccagaaggaactgaatgccctgcccgccgtggactacgaagctgtgaacaagacaaagtgggaatacttccacctcatcttcaagcaggaaggggaaaaggtgctggcatcggatgctttccgtaatttctacgaagccaacaaggaatggttgcagccatatgccgtcttcagctacctgcgtgatgcctacaagaccccgaatttccgcgagtggcccaagtatgccacctacgatgccaaggagatagagacattgtgccggccggactctgccgactatccgcatattgccatctactactacatccagttcaatctgcacctgcaactgcttgccgccaccgaacatgcgcgcaccaacggcgtagtgctgaaaggcgacatccccatcggcatcagccgcaacagtgtggaagcctggaaggaaccccactacttcaacctgaacggccaagccggtgcaccgcccgacgacttctccgtgaacggacagaactggggcctccccacctacaactgggatgtcatggaaaaagacggttatgcctggtggatgaaacgtttccacaaaatggcagaatacttcgatgcctaccgcatagaccacatcctcggcttcttccgcatttgggagataccgatgcacgccgtacacgggctgttgggacaattcgtccccgccctgcccatgacgcgcgaggagatagaaagctacgggctggcattccgcgaagacttcttcctgaagccctatatccatgagtacttcctcggacaaatcttcggcccgcatacagactatgtgaaacagaccttcatagagccgacagacacgtgggaggtttaccgcatgcgtcccgagttcgacacccagcgcaaggtggaagcctactttgccggaaaaacggacgatgacagcatctggattcgtgacgggctttacgcccttatcagcgatgtgctgttcgtacccgaccgcaacaatccgcacgaataccatccgcgcatcggcgtgcagcacgactacatctaccgcgcactgaacgattgggaaaaggctgccttcaaccggctgtatgaccagtactactatcaccgccacaacgacttctggggacagcaagccatgaagaaactgccgcaactgacacagtccacgcgcatgctggtatgcggtgaggacttaggcatgattcccgattgcgtggcatgggtgatgaacgacctgcgtatcctttccctggagatacaacgtatgccgaaagacccgaaacaagaattcggccacacagactggtatccataccgttcggtctgcaccatctccacgcacgacatgtctaccctgcgcggctggtgggaagaagacttccaacagacgcagcgttactacaacaccatgctcgggcactacggtgccgcaccggcaacggccacgccggagctctgcgaagaagtggttcgcaatcacctccatagcaactccatcctctgcatcctctccctgcaagactggatgtccatggacggcaaatggcgcaacccgaacgtgcaggaagaacgcatcaatattcctgccaacccgcggcactactggcgctggcgcatgcacctgacactggaacaactgatgaaggcagaaagcctgaacgagaaaataaggagcatgatagaaagcaccggaagataagaaaggattcttaacaaagggttattttaggcacggattacatggacaatcacggataatattgaaagcaaccgtgataacccgtataattccgtgcctaaaatagttcgataagtttattccgaccctcacataattgtattctataaaaaacaatttcgcgctatttttatattttacagaatacaatccgcaacctgaatcgtaataaccggatactgatttgcccgtaccacaaaatatcagtaagtttgcagaaaacaatctacaagtaatgaccagttatattttccttgacacgcttcgcttcttcgcccatcacggcgtgggtgaacaagaaaccgtggtaggcaatgagtttaccgtcagcctgcgcctgcaagttgatatccggcgtgcggcagaaacggacgacgtagccgacaccgtgagctatgccgatgtacatacagctgtgaaggcagagatggacattccttccaaactattggaacatgtatgcgggcgaattataaaccgattgttccacgacttcccacagatagaagaaataaccctcaagctggcaaagcgcaatccaccgatgggcgcggatatagaggctgcaggagtggaaatatgccaacgccgcggagaatgacagattgccgaatcaccccattcactattgatacacagacacttcccactgcaaagacactgcatgctttttgcagtggcgctgcaaacggtttgcagtaacactgcacatatatttgcagtagtactgcaacagctttgcagtaacgctgcaacagatatgcagtagcactgcaaaatgtatacagaagttctgcagtgagcatgcagcaacttttctgccgtagaatacaaccattgataccaatattccgtacctttgccccatcatcaacaaaaagtcaatgagaaacgctatacaacgactggcattactccccatcgtcgctctcttcctgctaccggccgcttgctatcaaatacagctccgagtttcattggagaaatgccctctacctgcccaccccttacgactttacaaacccatacaactatgcagacttcagaaggaatgaactattgaaaataaacctcacagagttccgcttcccctaccaatacctcaacgacatagaatgggcagattcaccaacaccattattgtgcaactctatgacttcaaacggcaagggtgggctatcgcaccagtgtgggctgtccatgaacgaagggtagcgatagattaagaatgcccagtagaaccgagtttcatccttatttttgccgtttccgcttctttgccgattccaccgcttcggccaccaccggcttatttgcaaaccgcttggtgtagttgctgtaatcgggaacagtgcgttcatacgtcgggtcgacaaacaacgggctggaaatgatatggtctgccgtactgcggttgcagcagaacacgatgttctccacaccggcaaggcgggtcaacgccttcacatccgtatcgtgcggctgaagggtcatcgggtcggtgaaaaagaaaagatagtcaatctctccgtccacaatgcgcgagcccatctgctggtcaccgcccaaaggaccggatttaaggatagtgaaatcccactccacatcaggatgtttctcccggagggcttcgaggataagggtacccgtggtacccgtacaatagaatttatgccccatcagcaattccgagttccacagtacccactcgatgaggtctttcttcatggcgtcgtgtgccactaatccgatttttctaactagtttttccataattcaaaacctttaatagattgaacaattataaaaggcaacagttcctacaattgggaaaagaatttctttccatgcagataaaactgcgccaatatactgttttttgtccgttccggtattacggcaagcgtagtttttttcagattctctttgcgggacgctgctaatgaagtgcggagggagtggtaggcacggcgcgcacggaatacggccaaagcattgggtaactggcctttcagcatgaaactgaacgcagccacataatcgagcaccgcacgtacacgcatcacggacgccaagtcctcctgcggcagattcttataaagcatgacaaggttattacgaaaattgaggaaggtcttgcgcggattctccttcttcaaagtggcccctcccacatgaaataccacactctgcggtatacatgccaactgtctgccacgggcacgaagccgccaacataaatctatctcctccatgtgggcaaaaaaacgtccgtccagcccacccacttcccggtagtctgccagacggatgaacagagccgcccccgtagcccagaaaatgggtatcaccgtgtcgtattgccccttgtcctcttctaccacgcccataatacggccgcggcagaagggatagccatagcggtcgatgaaacctcccgcagctccggcatattcaaactgccccttgttacgccaactgcgtatcttcggctggcaagcggccgtctccggataggcatccatatactctgccaacgggacaagccagtgctcggtgacctctacatcggagttgagcagcactacatattctgcctccacctgcttcaatgccagattgtatccgtcggcaaaaccgtggttctcttccagcagaatcaagtgcacagaaggaaactcgcgacggagcattgccacggaagcatccgtagagccattgtccgccacatacaccacagcaccatccacctccgaaaaacgcacaacagagggaaggaaggaacggagcatatcacatccgttccaattcaatatgacaacagcaatcttatccatgttgcacagattcttttcgtttatttttccagcgtttatgagaccagaaccaataagccggttcgcgccggatggtctgctccagacgacgggcgaagcactcggttatctcgccatccgccgtctgcttgggagtttcggtaaccaaatcgaagagcactttgcaatatcccctggatgtccgttccaattcacaataaaagacggggaagtccatcagcttggcaatgcgctcggcgccatccatgaacacggtgtcctgattcaagaaagtggtccaataatgggcctcgctgcggttgggcgactggtctgtaatcaggccgatggctatccgcctgccttcacggcgaagctttatcacttcgcgtgccgtggaatgtttcgccacattgtatcctccgaaccgggcgcggatatgcttaaacatctcgtccagatacttattgcttagcggtttgtacacctgcaccgggatgtcgcccggatgcatgatggcccccatgcctataatccactcaaaattggcataatggggaatcaacagtacaatgcctccatgcttctctatcatggcaaggtattcttccttattatcatacttcatccggcggcagagctcctcgaaagacatgcgcagcatcttcacctcttccagcatatagtcgcagatataatggtagaacttgcgctctatctccatcaattcggtttccgacttctccggaaaggaattgcgaaggttgcggcgaacgactttcttccgataatgcacgacgtggcgcatcaggaagtacagcccgtcagacaatgcataaagcgcccggaaaggcagaagtgccacaagccacatgcccgcataagtcaaccaatagacaatttttgatttcacttcgtcagttatgagttataagttatgagttatttgttgcaaaggcggcattcctcattccattgctcccaagagtgcggtgccgtcggcattgaaatcgcccaggcgcacagacacgagctggttgtccaaggcagcatcatgagggacttccacacggatataattgggagtgaagccgtgcatcggcagtccgggtttgggacgttccagcaacaccggcatcgtctgcccgatatggcgcgcataaaaagcacgggtcttttcgtccgaaagctccagcaattgctggctcctgcggtgcttttcttcgggtgccaccacgtggtctatcttcaaggcttgcgtgccgggacgctcagaatagctgaagacatggagctgcgtcacgtccaggctcttgataaactcataagcctgcccgaaatactcctccgtctctccacgggtacccacaatcacgtctacccctataaaggaatcgggcatcacttcctttatcttctttatcttcgaggcaaacaaggcggtatcgtaacggcgtcgcatcagcttcagcacctcgtcactgcccgactgcagcggtatatggaaatgaggcatgaaacgccgggaacgggacacgtattctatgatttcatctgtcagcagattcggctcgatggaggatatgcggtaacgctcaatgccttccacctcgtccagcgccttcaccaagtcgaagaaagtctcaccggtagacttgccgaagtctccgatattgacgccggtcaatacaatttcctttccaccttcggcagccgcctggctggcctgctccaccatagaagcaatgctgccgttacggctacgtccgcgggcaaagggaatggtgcaataggaacaataataatcgcagccgtcctgcactttcaggaagaagcgtgtccggtcgccacgcgaacaagacggggcaaacgaacgtatatccttcaaagcggaagtgtaggcctcgccggtctcgtgcttctgtagattgcccaggtagtggagcaggtccttcttctgctcggctcccagcacgacgtccacaccttctatctttgccaccgtctccggtttcagctgggcatagcaaccggtcaccacgacaaatgcacccggatgttgcttcaccagtttgtggatggcctggcggcacttcttgtctgccacttccgtcaccgagcaggtattcactacacaaatatccgctttctcacccttgcgcgccgtacgtacgcccgcttcccgcaaaattttaccgatagtagaggtctccgagaagttcagtttgcaccccaacgtatagtaaaccgccgtcttatcttgaaatatattggtatctatcatgagcttataaacacatttatgctgcaaatatatacattattaatctatttttcctacttttgcacactcaactaaaatttgtgcaatgatacaagagaactttatcaaactatacgagcatagtttccgcgagaattgggacctcccctgctataccaactatggagaaaacgagagctatacttatggcgaagtggcacaagaaatagccagactgcatcttattttcaagtactgccaactgcgccgcggcgacaagatagccgtcatcggcaagaacaatgcccgctggtgcatcgcctatatggccaccatcacctacggtggtatcgtagtccccattctgcaagacttcaaccccaatgatgtccatcatatcgtaaaccactccgaatcaacgttcctcttcaccagcgatgccatttgggaacatctggaagaagaacggcttactggacttcgcggtgtgttctcgctgagcgacttccgctgtctgtatcagcgggacggcgaaaccatccagcgtttcctcaagcatctgggcgatgagatggaagcgacctacccgaacgggttccgtaaggaagacatcgtttacacggacctttccaacgacaaggtcatgctgctgaattatacctcgggcaccaccggattcagtaagggcgtcatgctgacgggaaacaacctggccggcaacgtcaccttcggcatacgtaccgagctgctgaagaaaggggacaaagtgctctctttcctgcctttggcacatgcatacggctgcgcattcgatttccttaccgccacggccgtcggcacacacgtcacactgttgggaaaagtgccttccccaaagattctgatgaaagctttcgaggaagtgaaacccaacctgattatcaccgtcccccttgtcattgaaaagatatacaagaatgtcatacagcccatcatcaacaaaaagaccatgaaatgggcgctcagcattcccttgctcgacggacagatatacgggcaaatccgcaagaaactgattgacgcactgggcggacgtttcaaggaagtcatcataggaggcgcagccatgaacccggaagtggaagaattcttccaccgcatcaagttccccttcaccatcggctacggcatgactgaatgtgcccctctcatcagctatgctccctggaatgaattcgtcccgacttcctccggacgggtactcgacatcatggaagcccgtatctgcaaggaaaacccggacgacaaactcggcgaaatacaagtacgtggcgagaacgtgatgacgggttattacaaaaaccccgaagccaccaaagaagtcttcaccgaagacggatggcttcgcaccggcgacttgggtacactggacgacgacaacaacctatacatacgcggacgcagcaagaccatgattctcagttccagtggacagaatatcttccccgaagagatagaagcacggctcaacaacatgcctttcgtcctggaaagtcttgtcatcgaacggaataaaagactggtagcgctggtttatgccgactatgaagccctggattccttgggactaaaccagccggataaccttaaaaccatcatggatgagaatctcaaaaatctgaataacagcgtggcagcctacgaaaaagtaagccaaatccaactttatccgacagaatttgagaaaacgcccaaaagaagtatcaagagatacttatacaacagcattgccgaagattaatatgttgtaaaacatatagatagggataaaaacagccgaagctccaaaaaaaatataaaaaaagttggggtttcgagaacaacatattcaaaaagtacatacctttgcaacgttttaataaagcaattgattgtattacgttttaaaagtaaagaaaatgaaaaaattagttttgatggctgcagctatcgtagcagtatctttcgcatcttgtggcaacaaagcagctaacgctgaacaagcaactgcagattctatccgtatcgctgactcaatcgcagctgtagaagcagcagcagctgaagccgcagcagcagccgcagcagctgacactgtagcagtagatagcgcagctgttgtagctgaataatttcagtacaacactcgagagaattgaaagtctgacgtgcatacaagcacaccagactttttttatgtcttatcctctccttctgttcccttccaattgttaagtcttggtcttatttcacaaaaaagggtattatatggcagataaatgataaagtatagtgcatataccaaataaaagccgttactttgcatcaa
